(19) United States
(12) Patent Application Publication
(10) Pub. No.: US 2024/0301406 A1
(43) Pub. Date: Sep. 12, 2024

(54) COMPLEMENT COMPONENT C5 iRNA COMPOSITIONS AND METHODS OF USE THEREOF FOR TREATING PAROXYSMAL NOCTURNAL HEMOGLOBINURIA (PNH)

(71) Applicant: Alnylam Pharmaceuticals, Inc., Cambridge, MA (US)

(72) Inventors: Nader Najafian, Chestnut Hill, MA (US); Jae Kim, Lexington, MA (US); Mustafa Varoglu, Arlington, MA (US); Gabriel Robbie, Brookline, MA (US)

(21) Appl. No.: 18/218,638

(22) Filed: Jul. 6, 2023

Related U.S. Application Data
(63) Continuation of application No. 17/874,347, filed on Jul. 27, 2022, now abandoned.
Application No. 17/874,347 is a continuation of application No. 17/069,926, filed on Oct. 14, 2020, now abandoned.
Application No. 17/069,926 is a continuation of application No. 16/307,963, filed on Dec. 7, 2018, now abandoned.
(60) Provisional application No. 62/429,448, filed on Dec. 2, 2016.
(60) Provisional application No. 62/348,564, filed on Jun. 10, 2016.

(51) Int. Cl. C12N 15/113; A61K 39/00; A61K 39/395; A61P 13/02; C07K 16/18

(52) U.S. Cl. CPC C12N 15/113; A61K 39/3955; A61P 13/02; C07K 16/18; A61K 2039/545; C12N 2310/14; C12N 2310/315; C12N 2310/321; C12N 2310/322; C12N 2310/346; C12N 2310/351; C12N 2320/31; C12N 2320/35

(57) ABSTRACT

The invention relates to methods for treating subjects having a complement component C5-associated disease, e.g., paroxysmal nocturnal hemoglobinuria, using iRNA, e.g., double stranded ribonucleic acid (dsRNA), compositions targeting the complement component C5 gene, and anti-C5 antibodies, e.g., eculizumab.

### RELATED APPLICATIONS

[0001] This application is a continuation of U.S. patent application Ser. No. 17/874,347, filed on Jul. 27, 2022, which is a continuation of U.S. patent application Ser. No. 17/069,926, filed on Oct. 14, 2020, now abandoned, which is a continuation of U.S. patent application Ser. No. 16/307,963, filed on Dec. 7, 2018, now abandoned, which is a 35 U.S.C. § 371 national stage filing of International Application No. PCT/US2017/036775, filed on Jun. 9, 2017, which in turn claims the benefit of priority to U.S. Provisional Patent Application No. 62/348,564, filed on Jun. 10, 2016, and U.S. Provisional Patent Application No. 62/429,448, filed on Dec. 2, 2016. The entire contents of each of the foregoing patent applications are hereby incorporated herein by reference.

### SEQUENCE LISTING

[0002] The instant application contains a Sequence Listing which has been submitted electronically in XML file format and is hereby incorporated by reference in its entirety. Said XML copy, created on Apr. 30, 2024, is named 121301_06406_SL.xml and is 19,660,619 bytes in size.

### BACKGROUND OF THE INVENTION

[0003] Complement was first discovered in the 1890s when it was found to aid or “complement” the killing of bacteria by heat-stable antibodies present in normal serum (Walport, M. J. (2001) N Engl J Med. 344:1058). The complement system consists of more than 30 proteins that are either present as soluble proteins in the blood or are present as membrane-associated proteins. Activation of complement leads to a sequential cascade of enzymatic reactions, known as complement activation pathways, resulting in the formation of the potent anaphylatoxins C3a and C5a that elicit a plethora of physiological responses that range from chemoattraction to apoptosis. Initially, complement was thought to play a major role in innate immunity where a robust and rapid response is mounted against invading pathogens. However, recently it is becoming increasingly evident that complement also plays an important role in adaptive immunity involving T and B cells that help in elimination of pathogens (Dunkelberger J R and Song W C. (2010) Cell Res. 20:34; Molina H, et al. (1996) Proc Natl Acad Sci USA. 93:3357), in maintaining immunologic memory preventing pathogenic re-invasion, and is involved in numerous human pathological states (Qu, H, et al. (2009) Mol Immunol. 47:185; Wagner, E. and Frank M M. (2010) Nat Rev Drug Discov. 9:43).

[0004] Complement activation is known to occur through three different pathways: alternate, classical, and lectin (FIG. 1), involving proteins that mostly exist as inactive zymogens that are then sequentially cleaved and activated. All pathways of complement activation lead to cleavage of the C5 molecule generating the anaphylatoxin C5a and, C5b that subsequently forms the terminal complement complex (C5b-9). C5a exerts a predominant pro-inflammatory activity through interactions with the classical G-protein coupled receptor C5aR (CD88) as well as with the non-G protein coupled receptor C5L2 (GPR77), expressed on various immune and non-immune cells. C5b-9 causes cytolysis through the formation of the membrane attack complex (MAC), and sub-lytic MAC and soluble C5b-9 also possess a multitude of non-cytolytic immune functions. These two complement effectors, C5a and C5b-9, generated from C5 cleavage, are key components of the complement system responsible for propagating and/or initiating pathology in different diseases, including paroxysmal nocturnal hemoglobinuria, rheumatoid arthritis, ischemia-reperfusion injuries and neurodegenerative diseases.

[0005] To date, only one therapeutic that targets the C5-C5a axis is available for the treatment of complement component C5-associated diseases, the anti-C5 antibody, eculizumab (Soliris®). Although eculizumab has been shown to be effective for the treatment of paroxysmal nocturnal hemoglobinuria (PNH) and atypical hemolytic uremic syndrome (aHUS) and is currently being evaluated in clinical trials for additional complement component C5-associated diseases, eculizumab therapy requires weekly high dose infusions followed by biweekly maintenance infusions at a yearly cost of about $400,000. Furthermore, there is a wide-inter-individual varioation on the pharmcodynamics and clearance of eculizumab, and a significant number of patients being treated with eculizumab still require transfusions while undergoing treatment because of breakthrough or occult hemolysis (de Latour R (2015) Blood 125(5): 775-83; Jodele S, et al. (2015) BBMT 21(2): S225-S226; Gatault P, et al (2015) mAbs; 7:1205-11). Accordingly, there is a need in the art for alternative therapies and combination therapies which provide substantially consistent levels of efficacy and minimal breakthrough or occult hemolysis for subjects having a complement component C5-associated disease.

### SUMMARY OF THE INVENTION

[0006] The present invention provides methods and combination therapies for treating a subject having a disorder that would benefit from inhibiting or reducing the expression of a C5 gene, e.g., a complement component C5-associated disease, such as paroxysmal nocturnal hemoglobinuria (PNH), atypical hemolytic uremic syndrome (aHUS), neuromyelitis optica (NMO), and myasthenia gravis, using iRNA compositions which effect the RNA-induced silencing complex (RISC)-mediated cleavage of RNA transcripts of a C5 gene for inhibiting the expression of a C5 gene and anti-C5 antibodies, e.g., eculizumab.

[0007] The data presented herein demonstrate that iRNA agents and compositions of the invention are effective at treating PNH in eculizumab naïve subjects when administered as monotherapy at the dose of 200 mg or 400 mg. The data presented herein also demonstrate that the iRNA agents and compositions of the invention may be effectively used as a part of a combination therapy with eculizumab for treating subjects having PNH. Administering the iRNA agents and compositions of the invention in combination with eculizumab, e.g., in the setting of ongoing AD-62643 phramacology, allows reducing the dose of eculizumab while maintaining C5 knockdown, inhibition of complement activity and reduction of LDH levels in subjects with PNH. The data also demonstrate that iRNA agents and compositions of the invention are suitable for treating subjects having PNH who are inadequate responders to therapy with eculizumab alone (e.g., subjects having breakthrough hemolysis, i.e., subjects being treated with eculizumab that develop symptoms of intravascular hemolysis 1 to 2 days prior to their next eculizumab infusion).

[0008] Accordingly, in one aspect, the present prevention provides methods for treating, e.g., chronically treating, a subject having paroxysmal nocturnal hemoglobinuria (PNH). The methods include administering to an eculizumab naïve subject having PNH (i.e., a subject having PNH that has not been administered eculizumab) a 200-400 mg fixed dose of a double stranded ribonucleic acid (dsRNA) agent for inhibiting expression of complement component C5 once every week; and administering to the subject a dose of about 300 mg to about 900 mg of eculizumab, or an antigen-binding fragment thereof, wherein the dsRNA agent comprises a sense strand and an antisense strand, and wherein the sense strand comprises 5′-asasGfcAfaGfaUfAfUfuUfuuAfuAfaua-3′ (SEQ ID NO:2876) and the antisense strand comprises 5′-usAfsUfuAfuaAfaAfauaUfcUfuGfcuususudTdT-3′ (SEQ ID NO:2889), wherein a, g, c and u are 2′-O-methyl (2′-OMe) A, G, C, and U, respectively; Af, Gf, Cf and Uf are 2′-fluoro A, G, C and U, respectively; dT is a deoxy-thymine nucleotide; and s is a phosphorothioate linkage, thereby treating the subject.

[0009] In another aspect, the present invention provides methods for treating, e.g., chronically treating, a subject having paroxysmal nocturnal hemoglobinuria (PNH). The methods include administering to an eculizumab naïve subject having PNH a 200-400 mg fixed dose of a double stranded ribonucleic acid (dsRNA) agent for inhibiting expression of complement component C5 once every month; and administering to the subject a dose of about 300 mg to about 900 mg of eculizumab, or an antigen-binding fragment thereof, wherein the dsRNA agent comprises a sense strand and an antisense strand, and wherein the sense strand comprises 5′-asasGfcAfaGfaUfAfUfuUfuuAfuAfaua-3′ (SEQ ID NO:2876) and the antisense strand comprises 5′-usAfsUfuAfuaAfaAfauaUfcUfuGfcuususudTdT-3′ (SEQ ID NO:2889), wherein a, g, c and u are 2′-O-methyl (2′-OMe) A, G, C, and U, respectively; Af, Gf, Cf and Uf are 2′-fluoro A, G, C and U, respectively; dT is a deoxy-thymine nucleotide; and s is a phosphorothioate linkage, thereby treating the subject.

[0010] In one aspect, the present invention provides methods for treating, e.g., chronically treating, a subject having paroxysmal nocturnal hemoglobinuria (PNH). The methods include administering to an eculizumab naïve subject having PNH a 200 mg fixed dose of a double stranded ribonucleic acid (dsRNA) agent for inhibiting expression of complement component C5 once every week for 10-15 weeks, followed by a 400 mg fixed dose of the dsRNA agent once every week; and administering to the subject, a dose of about 300 mg to about 900 mg of eculizumab, or an antigen-binding fragment thereof, wherein the dsRNA agent comprises a sense strand and an antisense strand, and wherein the sense strand comprises 5′-asasGfcAfaGfaUfAfUfuUfuuAfuAfaua-3′ (SEQ ID NO:2876) and the antisense strand comprises 5′-usAfsUfuAfuaAfaAfauaUfcUfuGfcuususudTdT-3′ (SEQ ID NO:2889), wherein a, g, c and u are 2′-O-methyl (2′-OMe) A, G, C, and U, respectively; Af, Gf, Cf and Uf are 2′-fluoro A, G, C and U, respectively; dT is a deoxy-thymine nucleotide; and s is a phosphorothioate linkage, thereby treating the subject. In one embodiment, the dsRNA agent is administered to the subject at a 200 mg fixed dose once every week for thirteen weeks, followed by a 400 mg fixed dose of the dsRNA agent once every week.

[0011] In one aspect, the present invention provides methods for treating, e.g., chronically treating, a subject having paroxysmal nocturnal hemoglobinuria (PNH). The methods include administering to an eculizumab naïve subject having PNH a 200 mg fixed dose of a double stranded ribonucleic acid (dsRNA) agent for inhibiting expression of complement component C5 once every week for 10-15 weeks, followed by a 400 mg fixed dose of the dsRNA agent once every month; and administering to the subject, a dose of about 300 mg to about 900 mg of eculizumab, or an antigen-binding fragment thereof, wherein the dsRNA agent comprises a sense strand and an antisense strand, and wherein the sense strand comprises 5′-asasGfcAfaGfaUfAfUfuUfuuAfuAfaua-3′ (SEQ ID NO:2876) and the antisense strand comprises 5′-usAfsUfuAfuaAfaAfauaUfcUfuGfcuususudTdT-3′ (SEQ ID NO:2889), wherein a, g, c and u are 2′-O-methyl (2′-OMe) A, G, C, and U, respectively; Af, Gf, Cf and Uf are 2′-fluoro A, G, C and U, respectively; dT is a deoxy-thymine nucleotide; and s is a phosphorothioate linkage, thereby treating the subject. In one embodiment, the dsRNA agent is administered to the subject at a 200 mg fixed dose once every week for thirteen weeks, followed by a 400 mg fixed dose of the dsRNA agent once every month.

[0012] In another aspect, the present invention provides methods for treating, e.g., chronically treating, a subject having paroxysmal nocturnal hemoglobinuria (PNH). The methods include administering to an eculizumab naïve subject having PNH a 200 mg fixed dose of a double stranded ribonucleic acid (dsRNA) agent for inhibiting expression of complement component C5 once every month for 2 to 4 months; and administering to the subject, a dose of about 300 mg to about 900 mg of eculizumab, or an antigen-binding fragment thereof, wherein the dsRNA agent comprises a sense strand and an antisense strand, and wherein the sense strand comprises 5′-asasGfcAfaGfaUfAfUfuUfuuAfuAfaua-3′ (SEQ ID NO:2876) and the antisense strand comprises 5′-usAfsUfuAfuaAfaAfauaUfcUfuGfcuususudTdT-3′ (SEQ ID NO:2889), wherein a, g, c and u are 2′-O-methyl (2′-OMe) A, G, C, and U, respectively; Af, Gf, Cf and Uf are 2′-fluoro A, G, C and U, respectively; dT is a deoxy-thymine nucleotide; and s is a phosphorothioate linkage, thereby treating the subject.

[0013] In one aspect, the present invention provides methods for treating, e.g., chronically treating, a subject having paroxysmal nocturnal hemoglobinuria (PNH). The methods include administering to an eculizumab naïve subject having PNH a 200 mg fixed dose of a double stranded ribonucleic acid (dsRNA) agent for inhibiting expression of complement component C5 once every week; and administering to the subject, a dose of about 300 mg to about 900 mg of eculizumab, or an antigen-binding fragment thereof, once every four weeks, wherein the dsRNA agent comprises a sense strand and an antisense strand, and wherein the sense strand comprises 5′-asasGfcAfaGfaUfAfUfuUfuuAfuAfaua-3′ (SEQ ID NO:2876) and the antisense strand comprises 5′-usAfsUfuAfuaAfaAfauaUfcUfuGfcuususudTdT-3′ (SEQ ID NO:2889), wherein a, g, c and u are 2′-O-methyl (2′-OMe) A, G, C, and U, respectively; Af, Gf, Cf and Uf are 2′-fluoro A, G, C and U, respectively; dT is a deoxy-thymine nucleotide; and s is a phosphorothioate linkage, thereby treating the subject. In one embodiment, the dsRNA agent is administered to the subject at a 200 mg fixed dose of the dsRNA agent once every week for eight weeks, e.g., prior to the administration of eculizumab. In one embodiment, the dsRNA agent is administered to the subject at a 200 mg fixed dose of the dsRNA agent once every week for eight weeks, e.g., prior to the administration of eculizumab, and once every month thereafter. In another embodiment, the dsRNA agent is administered to the subject at a 200 mg fixed dose of the dsRNA agent once every week for eight weeks, e.g., prior to the administration of eculizumab, and once every three months thereafter. In another embodiment, the dsRNA agent is administered to the subject at a 200 mg fixed dose of the dsRNA agent once every week for eight weeks, e.g., prior to the administration of eculizumab, and once every six months thereafter. In one embodiment, the dsRNA agent is chronically administered to the subject at a 200 mg fixed dose of the dsRNA agent once every week.

[0014] In one aspect, the present invention provides methods for treating, e.g., chronically treating, a subject having paroxysmal nocturnal hemoglobinuria (PNH). The methods include administering to an eculizumab naïve subject having PNH a 200 mg fixed dose of a double stranded ribonucleic acid (dsRNA) agent for inhibiting expression of complement component C5 once every week; and administering to the subject, a dose of about 300 mg of eculizumab, or an antigen-binding fragment thereof, once every four weeks, wherein the dsRNA agent comprises a sense strand and an antisense strand, and wherein the sense strand comprises 5′-asasGfcAfaGfaUfAfUfuUfuuAfuAfaua-3′ (SEQ ID NO:2876) and the antisense strand comprises 5′-usAfsUfuAfuaAfaAfauaUfcUfuGfcuususudTdT-3′ (SEQ ID NO:2889), wherein a, g, c and u are 2′-O-methyl (2′-OMe) A, G, C, and U, respectively; Af, Gf, Cf and Uf are 2′-fluoro A, G, C and U, respectively; dT is a deoxy-thymine nucleotide; and s is a phosphorothioate linkage, thereby treating the subject. In one embodiment, the dsRNA agent is administered to the subject at a 200 mg fixed dose of the dsRNA agent once every week for eight weeks, e.g., prior to the administration of eculizumab. In one embodiment, the dsRNA agent is administered to the subject at a 200 mg fixed dose of the dsRNA agent once every week for eight weeks, e.g., prior to the administration of eculizumab, and once every month thereafter. In another embodiment, the dsRNA agent is administered to the subject at a 200 mg fixed dose of the dsRNA agent once every week for eight weeks, e.g., prior to the administration of eculizumab, and once every three months thereafter. In another embodiment, the dsRNA agent is administered to the subject at a 200 mg fixed dose of the dsRNA agent once every week for eight weeks, e.g., prior to the administration of eculizumab, and once every six months thereafter. In one embodiment, the dsRNA agent is chronically administered to the subject at a 200 mg fixed dose of the dsRNA agent once every week.

[0015] In one aspect, the present invention provides methods for treating, e.g., chronically treating, a subject having paroxysmal nocturnal hemoglobinuria (PNH). The methods include administering to an eculizumab naïve subject having PNH a 200 mg fixed dose of a double stranded ribonucleic acid (dsRNA) agent for inhibiting expression of complement component C5 once every week; and administering to the subject, a dose of about 600 mg of eculizumab, or an antigen-binding fragment thereof, once every four weeks, wherein the dsRNA agent comprises a sense strand and an antisense strand, and wherein the sense strand comprises 5′-asasGfcAfaGfaUfAfUfuUfuuAfuAfaua-3′ (SEQ ID NO:2876) and the antisense strand comprises 5′-usAfsUfuAfuaAfaAfauaUfcUfuGfcuususudTdT-3′ (SEQ ID NO:2889), wherein a, g, c and u are 2′-O-methyl (2′-OMe) A, G, C, and U, respectively; Af, Gf, Cf and Uf are 2′-fluoro A, G, C and U, respectively; dT is a deoxy-thymine nucleotide; and s is a phosphorothioate linkage, thereby treating the subject. In one embodiment, the dsRNA agent is administered to the subject at a 200 mg fixed dose of the dsRNA agent once every week for eight weeks, e.g., prior to the administration of eculizumab. In one embodiment, the dsRNA agent is administered to the subject at a 200 mg fixed dose of the dsRNA agent once every week for eight weeks, e.g., prior to the administration of eculizumab, and once every month thereafter. In another embodiment, the dsRNA agent is administered to the subject at a 200 mg fixed dose of the dsRNA agent once every week for eight weeks, e.g., prior to the administration of eculizumab, and once every three months thereafter. In another embodiment, the dsRNA agent is administered to the subject at a 200 mg fixed dose of the dsRNA agent once every week for eight weeks, e.g., prior to the administration of eculizumab, and once every six months thereafter. In one embodiment, the dsRNA agent is chronically administered to the subject at a 200 mg fixed dose of the dsRNA agent once every week.

[0016] In one aspect, the present invention provides methods for treating, e.g., chronically treating, a subject having paroxysmal nocturnal hemoglobinuria (PNH). The methods include administering to an eculizumab naïve subject having PNH a 200 mg fixed dose of a double stranded ribonucleic acid (dsRNA) agent for inhibiting expression of complement component C5 once every week; and administering to the subject, a dose of about 900 mg of eculizumab, or an antigen-binding fragment thereof, once every four weeks, wherein the dsRNA agent comprises a sense strand and an antisense strand, and wherein the sense strand comprises 5′-asasGfcAfaGfaUfAfUfuUfuuAfuAfaua-3′ (SEQ ID NO:2876) and the antisense strand comprises 5′-usAfsUfuAfuaAfaAfauaUfcUfuGfcuususudTdT-3′ (SEQ ID NO:2889), wherein a, g, c and u are 2′-O-methyl (2′-OMe) A, G, C, and U, respectively; Af, Gf, Cf and Uf are 2′-fluoro A, G, C and U, respectively; dT is a deoxy-thymine nucleotide; and s is a phosphorothioate linkage, thereby treating the subject. In one embodiment, the dsRNA agent is administered to the subject at a 200 mg fixed dose of the dsRNA agent once every week for eight weeks, e.g., prior to the administration of eculizumab. In one embodiment, the dsRNA agent is administered to the subject at a 200 mg fixed dose of the dsRNA agent once every week for eight weeks, e.g., prior to the administration of eculizumab, and once every month thereafter. In another embodiment, the dsRNA agent is administered to the subject at a 200 mg fixed dose of the dsRNA agent once every week for eight weeks, e.g., prior to the administration of eculizumab, and once every three months thereafter. In another embodiment, the dsRNA agent is administered to the subject at a 200 mg fixed dose of the dsRNA agent once every week for eight weeks, e.g., prior to the administration of eculizumab, and once every six months thereafter. In one embodiment, the dsRNA agent is chronically administered to the subject at a 200 mg fixed dose of the dsRNA agent once every week.

[0017] In another aspect, the present invention provides methods for treating, e.g., chronically treating, a subject having paroxysmal nocturnal hemoglobinuria (PNH). The methods include administering to an eculizumab naïve subject having PNH a 200 mg fixed dose of a double stranded ribonucleic acid (dsRNA) agent for inhibiting expression of complement component C5 once every month; and administering to the subject, a dose of about 300 mg to about 900 mg of eculizumab, or an antigen-binding fragment thereof, once every four weeks, wherein the dsRNA agent comprises a sense strand and an antisense strand, and wherein the sense strand comprises 5′-asasGfcAfaGfaUfAfUfuUfuuAfuAfaua-3′ (SEQ ID NO:2876) and the antisense strand comprises 5′-usAfsUfuAfuaAfaAfauaUfcUfuGfcuususudTdT-3′ (SEQ ID NO:2889), wherein a, g, c and u are 2′-O-methyl (2′-OMe) A, G, C, and U, respectively; Af, Gf, Cf and Uf are 2′-fluoro A, G, C and U, respectively; dT is a deoxy-thymine nucleotide; and s is a phosphorothioate linkage, thereby treating the subject. In one embodiment, the dsRNA agent is administered to the subject at a 200 mg fixed dose of the dsRNA agent once every month for two months, e.g., prior to the administration of eculizumab. In one embodiment, the dsRNA agent is administered to the subject at a 200 mg fixed dose of the dsRNA agent once every month for two months, e.g., prior to the administration of eculizumab, and once every three months thereafter. In one embodiment, the dsRNA agent is administered to the subject at a 200 mg fixed dose of the dsRNA agent once every month for two months, e.g., prior to the administration of eculizumab, and once every six months thereafter. In one embodiment, the dsRNA agent is chronically administered to the subject at a 200 mg fixed dose of the dsRNA agent once every month.

[0018] In another aspect, the present invention provides methods for treating, e.g., chronically treating, a subject having paroxysmal nocturnal hemoglobinuria (PNH). The methods include administering to an eculizumab naïve subject having PNH a 200 mg fixed dose of a double stranded ribonucleic acid (dsRNA) agent for inhibiting expression of complement component C5 once every month; and administering to the subject, a dose of about 300 mg of eculizumab, or an antigen-binding fragment thereof, once every four weeks, wherein the dsRNA agent comprises a sense strand and an antisense strand, and wherein the sense strand comprises 5′-asasGfcAfaGfaUfAfUfuUfuuAfuAfaua-3′ (SEQ ID NO:2876) and the antisense strand comprises 5′-usAfsUfuAfuaAfaAfauaUfcUfuGfcuususudTdT-3′ (SEQ ID NO:2889), wherein a, g, c and u are 2′-O-methyl (2′-OMe) A, G, C, and U, respectively; Af, Gf, Cf and Uf are 2′-fluoro A, G, C and U, respectively; dT is a deoxy-thymine nucleotide; and s is a phosphorothioate linkage, thereby treating the subject. In one embodiment, the dsRNA agent is administered to the subject at a 200 mg fixed dose of the dsRNA agent once every month for two months, e.g., prior to the administration of eculizumab. In one embodiment, the dsRNA agent is administered to the subject at a 200 mg fixed dose of the dsRNA agent once every month for two months, e.g., prior to the administration of eculizumab, and once every three months thereafter. In one embodiment, the dsRNA agent is administered to the subject at a 200 mg fixed dose of the dsRNA agent once every month for two months, e.g., prior to the administration of eculizumab, and once every six months thereafter. In one embodiment, the dsRNA agent is chronically administered to the subject at a 200 mg fixed dose of the dsRNA agent once every month.

[0019] In another aspect, the present invention provides methods for treating, e.g., chronically treating, a subject having paroxysmal nocturnal hemoglobinuria (PNH). The methods include administering to an eculizumab naïve subject having PNH a 200 mg fixed dose of a double stranded ribonucleic acid (dsRNA) agent for inhibiting expression of complement component C5 once every month; and administering to the subject, a dose of about 600 mg of eculizumab, or an antigen-binding fragment thereof, once every four weeks, wherein the dsRNA agent comprises a sense strand and an antisense strand, and wherein the sense strand comprises 5′-asasGfcAfaGfaUfAfUfuUfuuAfuAfaua-3′ (SEQ ID NO:2876) and the antisense strand comprises 5′-usAfsUfuAfuaAfaAfauaUfcUfuGfcuususudTdT-3′ (SEQ ID NO:2889), wherein a, g, c and u are 2′-O-methyl (2′-OMe) A, G, C, and U, respectively; Af, Gf, Cf and Uf are 2′-fluoro A, G, C and U, respectively; dT is a deoxy-thymine nucleotide; and s is a phosphorothioate linkage, thereby treating the subject. In one embodiment, the dsRNA agent is administered to the subject at a 200 mg fixed dose of the dsRNA agent once every month for two months, e.g., prior to the administration of eculizumab. In one embodiment, the dsRNA agent is administered to the subject at a 200 mg fixed dose of the dsRNA agent once every month for two months, e.g., prior to the administration of eculizumab, and once every three months thereafter. In one embodiment, the dsRNA agent is administered to the subject at a 200 mg fixed dose of the dsRNA agent once every month for two months, e.g., prior to the administration of eculizumab, and once every six months thereafter. In one embodiment, the dsRNA agent is chronically administered to the subject at a 200 mg fixed dose of the dsRNA agent once every month.

[0020] In another aspect, the present invention provides methods for treating, e.g., chronically treating, a subject having paroxysmal nocturnal hemoglobinuria (PNH). The methods include administering to an eculizumab naïve subject having PNH a 200 mg fixed dose of a double stranded ribonucleic acid (dsRNA) agent for inhibiting expression of complement component C5 once every month; and administering to the subject, a dose of about 900 mg of eculizumab, or an antigen-binding fragment thereof, once every four weeks, wherein the dsRNA agent comprises a sense strand and an antisense strand, and wherein the sense strand comprises 5′-asasGfcAfaGfaUfAfUfuUfuuAfuAfaua-3′ (SEQ ID NO:2876) and the antisense strand comprises 5′-usAfsUfuAfuaAfaAfauaUfcUfuGfcuususudTdT-3′ (SEQ ID NO:2889), wherein a, g, c and u are 2′-O-methyl (2′-OMe) A, G, C, and U, respectively; Af, Gf, Cf and Uf are 2′-fluoro A, G, C and U, respectively; dT is a deoxy-thymine nucleotide; and s is a phosphorothioate linkage, thereby treating the subject. In one embodiment, the dsRNA agent is administered to the subject at a 200 mg fixed dose of the dsRNA agent once every month for two months, e.g., prior to the administration of eculizumab. In one embodiment, the dsRNA agent is administered to the subject at a 200 mg fixed dose of the dsRNA agent once every month for two months, e.g., prior to the administration of eculizumab, and once every three months thereafter. In one embodiment, the dsRNA agent is administered to the subject at a 200 mg fixed dose of the dsRNA agent once every month for two months, e.g., prior to the administration of eculizumab, and once every six months thereafter. In one embodiment, the dsRNA agent is chronically administered to the subject at a 200 mg fixed dose of the dsRNA agent once every month. In one aspect, the present invention provides methods for treating, e.g., chronically treating, a subject having paroxysmal nocturnal hemoglobinuria (PNH). The methods include administering to an eculizumab naïve subject having PNH a 400 mg fixed dose of a double stranded ribonucleic acid (dsRNA) agent for inhibiting expression of complement component C5 once every week; and administering to the subject, a dose of about 300 mg to about 900 mg of eculizumab, or an antigen-binding fragment thereof, once every four weeks, wherein the dsRNA agent comprises a sense strand and an antisense strand, and wherein the sense strand comprises 5′-asasGfcAfaGfaUfAfUfuUfuuAfuAfaua-3′ (SEQ ID NO:2876) and the antisense strand comprises 5′-usAfsUfuAfuaAfaAfauaUfcUfuGfcuususudTdT-3′ (SEQ ID NO:2889), wherein a, g, c and u are 2′-O-methyl (2′-OMe) A, G, C, and U, respectively; Af, Gf, Cf and Uf are 2′-fluoro A, G, C and U, respectively; dT is a deoxy-thymine nucleotide; and s is a phosphorothioate linkage, thereby treating the subject. In one embodiment, the dsRNA agent is administered to the subject at a 400 mg fixed dose of the dsRNA agent once every week for eight weeks, e.g., prior to the administration of eculizumab. In one embodiment, the dsRNA agent is administered to the subject at a 400 mg fixed dose of the dsRNA agent once every week for eight weeks, e.g., prior to the administration of eculizumab, and once every month thereafter. In one embodiment, the dsRNA agent is administered to the subject at a 400 mg fixed dose of the dsRNA agent once every weeks for eight weeks, e.g., prior to the administration of eculizumab, and once every three months thereafter. In one embodiment, the dsRNA agent is administered to the subject at a 400 mg fixed dose of the dsRNA agent once every weeks for eight weeks, e.g., prior to the administration of eculizumab, and once every six months thereafter. In one embodiment, the dsRNA agent is chronically administered to the subject at a 400 mg fixed dose of the dsRNA agent once every week.

[0021] In one aspect, the present invention provides methods for treating, e.g., chronically treating, a subject having paroxysmal nocturnal hemoglobinuria (PNH). The methods include administering to an eculizumab naïve subject having PNH a 400 mg fixed dose of a double stranded ribonucleic acid (dsRNA) agent for inhibiting expression of complement component C5 once every week; and administering to the subject, a dose of about 300 mg of eculizumab, or an antigen-binding fragment thereof, once every four weeks, wherein the dsRNA agent comprises a sense strand and an antisense strand, and wherein the sense strand comprises 5′-asasGfcAfaGfaUfAfUfuUfuuAfuAfaua-3′ (SEQ ID NO:2876) and the antisense strand comprises 5′-usAfsUfuAfuaAfaAfauaUfcUfuGfcuususudTdT-3′ (SEQ ID NO:2889), wherein a, g, c and u are 2′-O-methyl (2′-OMe) A, G, C, and U, respectively; Af, Gf, Cf and Uf are 2′-fluoro A, G, C and U, respectively; dT is a deoxy-thymine nucleotide; and s is a phosphorothioate linkage, thereby treating the subject. In one embodiment, the dsRNA agent is administered to the subject at a 400 mg fixed dose of the dsRNA agent once every week for eight weeks, e.g., prior to the administration of eculizumab. In one embodiment, the dsRNA agent is administered to the subject at a 400 mg fixed dose of the dsRNA agent once every week for eight weeks, e.g., prior to the administration of eculizumab, and once every month thereafter. In one embodiment, the dsRNA agent is administered to the subject at a 400 mg fixed dose of the dsRNA agent once every weeks for eight weeks, e.g., prior to the administration of eculizumab, and once every three months thereafter. In one embodiment, the dsRNA agent is administered to the subject at a 400 mg fixed dose of the dsRNA agent once every weeks for eight weeks, e.g., prior to the administration of eculizumab, and once every six months thereafter. In one embodiment, the dsRNA agent is chronically administered to the subject at a 400 mg fixed dose of the dsRNA agent once every week.

[0022] In one aspect, the present invention provides methods for treating, e.g., chronically treating, a subject having paroxysmal nocturnal hemoglobinuria (PNH). The methods include administering to an eculizumab naïve subject having PNH a 400 mg fixed dose of a double stranded ribonucleic acid (dsRNA) agent for inhibiting expression of complement component C5 once every week; and administering to the subject, a dose of about 600 mg of eculizumab, or an antigen-binding fragment thereof, once every four weeks, wherein the dsRNA agent comprises a sense strand and an antisense strand, and wherein the sense strand comprises 5′-asasGfcAfaGfaUfAfUfuUfuuAfuAfaua-3′ (SEQ ID NO:2876) and the antisense strand comprises 5′-usAfsUfuAfuaAfaAfauaUfcUfuGfcuususudTdT-3′ (SEQ ID NO:2889), wherein a, g, c and u are 2′-O-methyl (2′-OMe) A, G, C, and U, respectively; Af, Gf, Cf and Uf are 2′-fluoro A, G, C and U, respectively; dT is a deoxy-thymine nucleotide; and s is a phosphorothioate linkage, thereby treating the subject. In one embodiment, the dsRNA agent is administered to the subject at a 400 mg fixed dose of the dsRNA agent once every week for eight weeks, e.g., prior to the administration of eculizumab. In one embodiment, the dsRNA agent is administered to the subject at a 400 mg fixed dose of the dsRNA agent once every week for eight weeks, e.g., prior to the administration of eculizumab, and once every month thereafter. In one embodiment, the dsRNA agent is administered to the subject at a 400 mg fixed dose of the dsRNA agent once every weeks for eight weeks, e.g., prior to the administration of eculizumab, and once every three months thereafter. In one embodiment, the dsRNA agent is administered to the subject at a 400 mg fixed dose of the dsRNA agent once every weeks for eight weeks, e.g., prior to the administration of eculizumab, and once every six months thereafter. In one embodiment, the dsRNA agent is chronically administered to the subject at a 400 mg fixed dose of the dsRNA agent once every week.

[0023] In one aspect, the present invention provides methods for treating, e.g., chronically treating, a subject having paroxysmal nocturnal hemoglobinuria (PNH). The methods include administering to an eculizumab naïve subject having PNH a 400 mg fixed dose of a double stranded ribonucleic acid (dsRNA) agent for inhibiting expression of complement component C5 once every week; and administering to the subject, a dose of about 900 mg of eculizumab, or an antigen-binding fragment thereof, once every four weeks, wherein the dsRNA agent comprises a sense strand and an antisense strand, and wherein the sense strand comprises 5′-asasGfcAfaGfaUfAfUfuUfuuAfuAfaua-3′ (SEQ ID NO:2876) and the antisense strand comprises 5′-usAfsUfuAfuaAfaAfauaUfcUfuGfcuususudTdT-3′ (SEQ ID NO:2889), wherein a, g, c and u are 2′-O-methyl (2′-OMe) A, G, C, and U, respectively; Af, Gf, Cf and Uf are 2′-fluoro A, G, C and U, respectively; dT is a deoxy-thymine nucleotide; and s is a phosphorothioate linkage, thereby treating the subject. In one embodiment, the dsRNA agent is administered to the subject at a 400 mg fixed dose of the dsRNA agent once every week for eight weeks, e.g., prior to the administration of eculizumab. In one embodiment, the dsRNA agent is administered to the subject at a 400 mg fixed dose of the dsRNA agent once every week for eight weeks, e.g., prior to the administration of eculizumab, and once every month thereafter. In one embodiment, the dsRNA agent is administered to the subject at a 400 mg fixed dose of the dsRNA agent once every weeks for eight weeks, e.g., prior to the administration of eculizumab, and once every three months thereafter. In one embodiment, the dsRNA agent is administered to the subject at a 400 mg fixed dose of the dsRNA agent once every weeks for eight weeks, e.g., prior to the administration of eculizumab, and once every six months thereafter. In one embodiment, the dsRNA agent is chronically administered to the subject at a 400 mg fixed dose of the dsRNA agent once every week.

[0024] In another aspect, the present invention provides methods for treating, e.g., chronically treating, a subject having paroxysmal nocturnal hemoglobinuria (PNH). The methods include administering to an eculizumab naïve subject having PNH a 400 mg fixed dose of a double stranded ribonucleic acid (dsRNA) agent for inhibiting expression of complement component C5 once every month; and administering to the subject, a dose of about 300 mg to about 900 mg of eculizumab, or an antigen-binding fragment thereof, once every four weeks, wherein the dsRNA agent comprises a sense strand and an antisense strand, and wherein the sense strand comprises 5′-asasGfcAfaGfaUfAfUfuUfuuAfuAfaua-3′ (SEQ ID NO:2876) and the antisense strand comprises 5′-usAfsUfuAfuaAfaAfauaUfcUfuGfcuususudTdT-3′ (SEQ ID NO:2889), wherein a, g, c and u are 2′-O-methyl (2′-OMe) A, G, C, and U, respectively; Af, Gf, Cf and Uf are 2′-fluoro A, G, C and U, respectively; dT is a deoxy-thymine nucleotide; and s is a phosphorothioate linkage, thereby treating the subject. In one embodiment, the dsRNA agent is administered to the subject at a 400 mg fixed dose of the dsRNA agent once every month for two months, e.g., prior to the administration of eculizumab. In one embodiment, the dsRNA agent is administered to the subject at a 400 mg fixed dose of the dsRNA agent once every month for two months, e.g., prior to the administration of eculizumab, and once every three months thereafter. In one embodiment, the dsRNA agent is administered to the subject at a 400 mg fixed dose of the dsRNA agent once every month for two months, e.g., prior to the administration of eculizumab, and once every six months thereafter. In one embodiment, the dsRNA agent is chronically administered to the subject at a 400 mg fixed dose of the dsRNA agent once every month.

[0025] In another aspect, the present invention provides methods for treating, e.g., chronically treating, a subject having paroxysmal nocturnal hemoglobinuria (PNH). The methods include administering to an eculizumab naïve subject having PNH a 400 mg fixed dose of a double stranded ribonucleic acid (dsRNA) agent for inhibiting expression of complement component C5 once every month; and administering to the subject, a dose of about 300 mg of eculizumab, or an antigen-binding fragment thereof, wherein the dsRNA agent comprises a sense strand and an antisense strand, and wherein the sense strand comprises 5′-asasGfcAfaGfaUfAfUfuUfuuAfuAfaua-3′ (SEQ ID NO:2876) and the antisense strand comprises 5′-usAfsUfuAfuaAfaAfauaUfcUfuGfcuususudTdT-3′ (SEQ ID NO:2889), wherein a, g, c and u are 2′-O-methyl (2′-OMe) A, G, C, and U, respectively; Af, Gf, Cf and Uf are 2′-fluoro A, G, C and U, respectively; dT is a deoxy-thymine nucleotide; and s is a phosphorothioate linkage, thereby treating the subject. In one embodiment, the dsRNA agent is administered to the subject at a 400 mg fixed dose of the dsRNA agent once every month for two months, e.g., prior to the administration of eculizumab. In one embodiment, the dsRNA agent is administered to the subject at a 400 mg fixed dose of the dsRNA agent once every month for two months, e.g., prior to the administration of eculizumab, and once every three months thereafter. In one embodiment, the dsRNA agent is administered to the subject at a 400 mg fixed dose of the dsRNA agent once every month for two months, e.g., prior to the administration of eculizumab, and once every six months thereafter. In one embodiment, the dsRNA agent is chronically administered to the subject at a 400 mg fixed dose of the dsRNA agent once every month.

[0026] In another aspect, the present invention provides methods for treating, e.g., chronically treating, a subject having paroxysmal nocturnal hemoglobinuria (PNH). The methods include administering to an eculizumab naïve subject having PNH a 400 mg fixed dose of a double stranded ribonucleic acid (dsRNA) agent for inhibiting expression of complement component C5 once every month; and administering to the subject, a dose of about 600 mg of eculizumab, or an antigen-binding fragment thereof, wherein the dsRNA agent comprises a sense strand and an antisense strand, and wherein the sense strand comprises 5′-asasGfcAfaGfaUfAfUfuUfuuAfuAfaua-3′ (SEQ ID NO:2876) and the antisense strand comprises 5′-usAfsUfuAfuaAfaAfauaUfcUfuGfcuususudTdT-3′ (SEQ ID NO:2889), wherein a, g, c and u are 2′-O-methyl (2′-OMe) A, G, C, and U, respectively; Af, Gf, Cf and Uf are 2′-fluoro A, G, C and U, respectively; dT is a deoxy-thymine nucleotide; and s is a phosphorothioate linkage, thereby treating the subject. In one embodiment, the dsRNA agent is administered to the subject at a 400 mg fixed dose of the dsRNA agent once every month for two months, e.g., prior to the administration of eculizumab. In one embodiment, the dsRNA agent is administered to the subject at a 400 mg fixed dose of the dsRNA agent once every month for two months, e.g., prior to the administration of eculizumab, and once every three months thereafter. In one embodiment, the dsRNA agent is administered to the subject at a 400 mg fixed dose of the dsRNA agent once every month for two months, e.g., prior to the administration of eculizumab, and once every six months thereafter. In one embodiment, the dsRNA agent is chronically administered to the subject at a 400 mg fixed dose of the dsRNA agent once every month.

[0027] In another aspect, the present invention provides methods for treating, e.g., chronically treating, a subject having paroxysmal nocturnal hemoglobinuria (PNH). The methods include administering to an eculizumab naïve subject having PNH a 400 mg fixed dose of a double stranded ribonucleic acid (dsRNA) agent for inhibiting expression of complement component C5 once every month; and administering to the subject, a dose of about 900 mg of eculizumab, or an antigen-binding fragment thereof, wherein the dsRNA agent comprises a sense strand and an antisense strand, and wherein the sense strand comprises 5′-asasGfcAfaGfaUfAfUfuUfuuAfuAfaua-3′ (SEQ ID NO:2876) and the antisense strand comprises 5′-usAfsUfuAfuaAfaAfauaUfcUfuGfcuususudTdT-3′ (SEQ ID NO:2889), wherein a, g, c and u are 2′-O-methyl (2′-OMe) A, G, C, and U, respectively; Af, Gf, Cf and Uf are 2′-fluoro A, G, C and U, respectively; dT is a deoxy-thymine nucleotide; and s is a phosphorothioate linkage, thereby treating the subject. In one embodiment, the dsRNA agent is administered to the subject at a 400 mg fixed dose of the dsRNA agent once every month for two months, e.g., prior to the administration of eculizumab. In one embodiment, the dsRNA agent is administered to the subject at a 400 mg fixed dose of the dsRNA agent once every month for two months, e.g., prior to the administration of eculizumab, and once every three months thereafter. In one embodiment, the dsRNA agent is administered to the subject at a 400 mg fixed dose of the dsRNA agent once every month for two months, e.g., prior to the administration of eculizumab, and once every six months thereafter. In one embodiment, the dsRNA agent is chronically administered to the subject at a 400 mg fixed dose of the dsRNA agent once every month. In one aspect, the present invention provides methods for treating, e.g., chronically treating, a subject having paroxysmal nocturnal hemoglobinuria (PNH). The methods include administering to a subject having PNH and previously treated with eculizumab, a 400 mg fixed dose of a double stranded ribonucleic acid (dsRNA) agent for inhibiting expression of complement component C5 once every week; and administering to the subject, a dose of about 300 mg to about 900 mg of eculizumab, or an antigen-binding fragment thereof, once every four weeks, wherein the dsRNA agent comprises a sense strand and an antisense strand, and wherein the sense strand comprises 5′-asasGfcAfaGfaUfAfUfuUfuuAfuAfaua-3′ (SEQ ID NO:2876) and the antisense strand comprises 5′-usAfsUfuAfuaAfaAfauaUfcUfuGfcuususudTdT-3′ (SEQ ID NO:2889), wherein a, g, c and u are 2′-O-methyl (2′-OMe) A, G, C, and U, respectively; Af, Gf, Cf and Uf are 2′-fluoro A, G, C and U, respectively; dT is a deoxy-thymine nucleotide; and s is a phosphorothioate linkage, thereby treating the subject. In one embodiment, the dsRNA agent is administered to the subject at a 400 mg fixed dose of the dsRNA agent once every week for eight weeks, e.g., prior to administration of the dose of about 300 mg to about 900 mg of eculizumab, or an antigen-binding fragment thereof. In one embodiment, the dsRNA agent is administered to the subject at a 400 mg fixed dose of the dsRNA agent once every week for eight weeks, e.g., prior to administration of the dose of about 300 mg to about 900 mg of eculizumab, or an antigen-binding fragment thereof, and once every month thereafter. In one embodiment, the dsRNA agent is administered to the subject at a 400 mg fixed dose of the dsRNA agent once every weeks for eight weeks, e.g., prior to administration of the dose of about 300 mg to about 900 mg of eculizumab, or an antigen-binding fragment thereof, and once every three months thereafter. In one embodiment, the dsRNA agent is administered to the subject at a 400 mg fixed dose of the dsRNA agent once every weeks for eight weeks, e.g., prior to administration of the dose of about 300 mg to about 900 mg of eculizumab, or an antigen-binding fragment thereof, and once every six months thereafter. In one embodiment, the dsRNA agent is chronically administered to the subject at a 400 mg fixed dose of the dsRNA agent once every week.

[0028] In one aspect, the present invention provides methods for treating, e.g., chronically treating, a subject having paroxysmal nocturnal hemoglobinuria (PNH). The methods include administering to a subject having PNH and previously treated with eculizumab a 400 mg fixed dose of a double stranded ribonucleic acid (dsRNA) agent for inhibiting expression of complement component C5 once every week; and administering to the subject, a dose of about 300 mg of eculizumab, or an antigen-binding fragment thereof, once every four weeks, wherein the dsRNA agent comprises a sense strand and an antisense strand, and wherein the sense strand comprises 5′-asasGfcAfaGfaUfAfUfuUfuuAfuAfaua-3′ (SEQ ID NO:2876) and the antisense strand comprises 5′-usAfsUfuAfuaAfaAfauaUfcUfuGfcuususudTdT-3′ (SEQ ID NO:2889), wherein a, g, c and u are 2′-O-methyl (2′-OMe) A, G, C, and U, respectively; Af, Gf, Cf and Uf are 2′-fluoro A, G, C and U, respectively; dT is a deoxy-thymine nucleotide; and s is a phosphorothioate linkage, thereby treating the subject. In one embodiment, the dsRNA agent is administered to the subject at a 400 mg fixed dose of the dsRNA agent once every week for eight weeks, e.g., prior to administration of the dose of about 300 mg of eculizumab, or an antigen-binding fragment thereof. In one embodiment, the dsRNA agent is administered to the subject at a 400 mg fixed dose of the dsRNA agent once every week for eight weeks, e.g., prior to administration of the dose of about 300 mg of eculizumab, or an antigen-binding fragment thereof, and once every month thereafter. In one embodiment, the dsRNA agent is administered to the subject at a 400 mg fixed dose of the dsRNA agent once every weeks for eight weeks, e.g., prior to administration of the dose of about 300 mg of eculizumab, or an antigen-binding fragment thereof, and once every three months thereafter. In one embodiment, the dsRNA agent is administered to the subject at a 400 mg fixed dose of the dsRNA agent once every weeks for eight weeks, e.g., prior to administration of the dose of about 300 mg of eculizumab, or an antigen-binding fragment thereof, and once every six months thereafter. In one embodiment, the dsRNA agent is chronically administered to the subject at a 400 mg fixed dose of the dsRNA agent once every week.

[0029] In one aspect, the present invention provides methods for treating, e.g., chronically treating, a subject having paroxysmal nocturnal hemoglobinuria (PNH). The methods include administering to a subject having PNH and previously treated with eculizumab a 400 mg fixed dose of a double stranded ribonucleic acid (dsRNA) agent for inhibiting expression of complement component C5 once every week; and administering to the subject, a dose of about 600 mg of eculizumab, or an antigen-binding fragment thereof, once every four weeks, wherein the dsRNA agent comprises a sense strand and an antisense strand, and wherein the sense strand comprises 5′-asasGfcAfaGfaUfAfUfuUfuuAfuAfaua-3′ (SEQ ID NO:2876) and the antisense strand comprises 5′-usAfsUfuAfuaAfaAfauaUfcUfuGfcuususudTdT-3′ (SEQ ID NO:2889), wherein a, g, c and u are 2′-O-methyl (2′-OMe) A, G, C, and U, respectively; Af, Gf, Cf and Uf are 2′-fluoro A, G, C and U, respectively; dT is a deoxy-thymine nucleotide; and s is a phosphorothioate linkage, thereby treating the subject. In one embodiment, the dsRNA agent is administered to the subject at a 400 mg fixed dose of the dsRNA agent once every week for eight weeks, e.g., prior to administration of the dose of about 600 mg of eculizumab, or an antigen-binding fragment thereof. In one embodiment, the dsRNA agent is administered to the subject at a 400 mg fixed dose of the dsRNA agent once every week for eight weeks, e.g., prior to administration of the dose of about 600 mg of eculizumab, or an antigen-binding fragment thereof, and once every month thereafter. In one embodiment, the dsRNA agent is administered to the subject at a 400 mg fixed dose of the dsRNA agent once every weeks for eight weeks, e.g., prior to administration of the dose of about 600 mg of eculizumab, or an antigen-binding fragment thereof, and once every three months thereafter. In one embodiment, the dsRNA agent is administered to the subject at a 400 mg fixed dose of the dsRNA agent once every weeks for eight weeks, e.g., prior to administration of the dose of about 600 mg of eculizumab, or an antigen-binding fragment thereof, and once every six months thereafter. In one embodiment, the dsRNA agent is chronically administered to the subject at a 400 mg fixed dose of the dsRNA agent once every week.

[0030] In one aspect, the present invention provides methods for treating, e.g., chronically treating, a subject having paroxysmal nocturnal hemoglobinuria (PNH). The methods include administering to a subject having PNH and previously treated with eculizumab a 400 mg fixed dose of a double stranded ribonucleic acid (dsRNA) agent for inhibiting expression of complement component C5 once every week; and administering to the subject, a dose of about 900 mg of eculizumab, or an antigen-binding fragment thereof, once every four weeks, wherein the dsRNA agent comprises a sense strand and an antisense strand, and wherein the sense strand comprises 5′-asasGfcAfaGfaUfAfUfuUfuuAfuAfaua-3′ (SEQ ID NO:2876) and the antisense strand comprises 5′-usAfsUfuAfuaAfaAfauaUfcUfuGfcuususudTdT-3′ (SEQ ID NO:2889), wherein a, g, c and u are 2′-O-methyl (2′-OMe) A, G, C, and U, respectively; Af, Gf, Cf and Uf are 2′-fluoro A, G, C and U, respectively; dT is a deoxy-thymine nucleotide; and s is a phosphorothioate linkage, thereby treating the subject. In one embodiment, the dsRNA agent is administered to the subject at a 400 mg fixed dose of the dsRNA agent once every week for eight weeks, e.g., prior to administration of the dose of about 900 mg of eculizumab, or an antigen-binding fragment thereof. In one embodiment, the dsRNA agent is administered to the subject at a 400 mg fixed dose of the dsRNA agent once every week for eight weeks, e.g., prior to administration of the dose of about 900 mg of eculizumab, or an antigen-binding fragment thereof, and once every month thereafter. In one embodiment, the dsRNA agent is administered to the subject at a 400 mg fixed dose of the dsRNA agent once every weeks for eight weeks, e.g., prior to administration of the dose of about 900 mg of eculizumab, or an antigen-binding fragment thereof, and once every three months thereafter. In one embodiment, the dsRNA agent is administered to the subject at a 400 mg fixed dose of the dsRNA agent once every weeks for eight weeks, e.g., prior to administration of the dose of about 900 mg of eculizumab, or an antigen-binding fragment thereof, and once every six months thereafter. In one embodiment, the dsRNA agent is chronically administered to the subject at a 400 mg fixed dose of the dsRNA agent once every week.

[0031] In another aspect, the present invention provides methods for treating, e.g., chronically treating, a subject having paroxysmal nocturnal hemoglobinuria (PNH), comprising administering to a subject having PNH and previously treated with eculizumab, a 400 mg fixed dose of a double stranded ribonucleic acid (dsRNA) agent for inhibiting expression of complement component C5 once every month; and administering to the subject, a dose of about 300 mg to about 900 mg of eculizumab, or an antigen-binding fragment thereof, once every four weeks, wherein the dsRNA agent comprises a sense strand and an antisense strand, and wherein the sense strand comprises 5′-asasGfcAfaGfaUfAfUfuUfuuAfuAfaua-3′ (SEQ ID NO:2876) and the antisense strand comprises 5′-usAfsUfuAfuaAfaAfauaUfcUfuGfcuususudTdT-3′ (SEQ ID NO:2889), wherein a, g, c and u are 2′-O-methyl (2′-OMe) A, G, C, and U, respectively; Af, Gf, Cf and Uf are 2′-fluoro A, G, C and U, respectively; dT is a deoxy-thymine nucleotide; and s is a phosphorothioate linkage, thereby treating the subject. In one embodiment, the dsRNA agent is administered to the subject at a 400 mg fixed dose of the dsRNA agent once every month for two months, e.g., prior to administration of the dose of about 300 mg to about 900 mg of eculizumab, or an antigen-binding fragment thereof. In one embodiment, the dsRNA agent is administered to the subject at a 400 mg fixed dose of the dsRNA agent once every month for two months, e.g., prior to administration of the dose of about 300 mg to about 900 mg of eculizumab, or an antigen-binding fragment thereof, and once every three months thereafter. In one embodiment, the dsRNA agent is administered to the subject at a 400 mg fixed dose of the dsRNA agent once every month for two months, e.g., prior to administration of the dose of about 300 mg to about 900 mg of eculizumab, or an antigen-binding fragment thereof, and once every six months thereafter. In one embodiment, the dsRNA agent is chronically administered to the subject at a 400 mg fixed dose of the dsRNA agent once every month.

[0032] In another aspect, the present invention provides methods for treating, e.g., chronically treating, a subject having paroxysmal nocturnal hemoglobinuria (PNH), comprising administering to a subject having PNH and previously treated with eculizumab, a 400 mg fixed dose of a double stranded ribonucleic acid (dsRNA) agent for inhibiting expression of complement component C5 once every month; and administering to the subject, a dose of about 300 mg of eculizumab, or an antigen-binding fragment thereof, once every four weeks, wherein the dsRNA agent comprises a sense strand and an antisense strand, and wherein the sense strand comprises 5′-asasGfcAfaGfaUfAfUfuUfuuAfuAfaua-3′ (SEQ ID NO:2876) and the antisense strand comprises 5′-usAfsUfuAfuaAfaAfauaUfcUfuGfcuususudTdT-3′ (SEQ ID NO:2889), wherein a, g, c and u are 2′-O-methyl (2′-OMe) A, G, C, and U, respectively; Af, Gf, Cf and Uf are 2′-fluoro A, G, C and U, respectively; dT is a deoxy-thymine nucleotide; and s is a phosphorothioate linkage, thereby treating the subject. In one embodiment, the dsRNA agent is administered to the subject at a 400 mg fixed dose of the dsRNA agent once every month for two months, e.g., prior to administration of the dose of about 300 mg of eculizumab, or an antigen-binding fragment thereof. In one embodiment, the dsRNA agent is administered to the subject at a 400 mg fixed dose of the dsRNA agent once every month for two months, e.g., prior to administration of the dose of about 300 mg of eculizumab, or an antigen-binding fragment thereof, and once every three months thereafter. In one embodiment, the dsRNA agent is administered to the subject at a 400 mg fixed dose of the dsRNA agent once every month for two months, e.g., prior to administration of the dose of about 300 mg of eculizumab, or an antigen-binding fragment thereof, and once every six months thereafter. In one embodiment, the dsRNA agent is chronically administered to the subject at a 400 mg fixed dose of the dsRNA agent once every month.

[0033] In another aspect, the present invention provides methods for treating, e.g., chronically treating, a subject having paroxysmal nocturnal hemoglobinuria (PNH), comprising administering to a subject having PNH and previously treated with eculizumab, a 400 mg fixed dose of a double stranded ribonucleic acid (dsRNA) agent for inhibiting expression of complement component C5 once every month; and administering to the subject, a dose of about 600 mg of eculizumab, or an antigen-binding fragment thereof, once every four weeks, wherein the dsRNA agent comprises a sense strand and an antisense strand, and wherein the sense strand comprises 5′-asasGfcAfaGfaUfAfUfuUfuuAfuAfaua-3′ (SEQ ID NO:2876) and the antisense strand comprises 5′-usAfsUfuAfuaAfaAfauaUfcUfuGfcuususudTdT-3′ (SEQ ID NO:2889), wherein a, g, c and u are 2′-O-methyl (2′-OMe) A, G, C, and U, respectively; Af, Gf, Cf and Uf are 2′-fluoro A, G, C and U, respectively; dT is a deoxy-thymine nucleotide; and s is a phosphorothioate linkage, thereby treating the subject. In one embodiment, the dsRNA agent is administered to the subject at a 400 mg fixed dose of the dsRNA agent once every month for two months, e.g., prior to administration of the dose of about 600 mg of eculizumab, or an antigen-binding fragment thereof. In one embodiment, the dsRNA agent is administered to the subject at a 400 mg fixed dose of the dsRNA agent once every month for two months, e.g., prior to administration of the dose of about 600 mg of eculizumab, or an antigen-binding fragment thereof, and once every three months thereafter. In one embodiment, the dsRNA agent is administered to the subject at a 400 mg fixed dose of the dsRNA agent once every month for two months, e.g., prior to administration of the dose of about 600 mg of eculizumab, or an antigen-binding fragment thereof, and once every six months thereafter. In one embodiment, the dsRNA agent is chronically administered to the subject at a 400 mg fixed dose of the dsRNA agent once every month.

[0034] In another aspect, the present invention provides methods for treating, e.g., chronically treating, a subject having paroxysmal nocturnal hemoglobinuria (PNH), comprising administering to a subject having PNH and previously treated with eculizumab, a 400 mg fixed dose of a double stranded ribonucleic acid (dsRNA) agent for inhibiting expression of complement component C5 once every month; and administering to the subject, a dose of about 900 mg of eculizumab, or an antigen-binding fragment thereof, once every four weeks, wherein the dsRNA agent comprises a sense strand and an antisense strand, and wherein the sense strand comprises 5′-asasGfcAfaGfaUfAfUfuUfuuAfuAfaua-3′ (SEQ ID NO:2876) and the antisense strand comprises 5′-usAfsUfuAfuaAfaAfauaUfcUfuGfcuususudTdT-3′ (SEQ ID NO:2889), wherein a, g, c and u are 2′-O-methyl (2′-OMe) A, G, C, and U, respectively; Af, Gf, Cf and Uf are 2′-fluoro A, G, C and U, respectively; dT is a deoxy-thymine nucleotide; and s is a phosphorothioate linkage, thereby treating the subject. In one embodiment, the dsRNA agent is administered to the subject at a 400 mg fixed dose of the dsRNA agent once every month for two months, e.g., prior to administration of the dose of about 900 mg of eculizumab, or an antigen-binding fragment thereof. In one embodiment, the dsRNA agent is administered to the subject at a 400 mg fixed dose of the dsRNA agent once every month for two months, e.g., prior to administration of the dose of about 300 mg of eculizumab, or an antigen-binding fragment thereof, and once every three months thereafter. In one embodiment, the dsRNA agent is administered to the subject at a 400 mg fixed dose of the dsRNA agent once every month for two months, e.g., prior to administration of the dose of about 300 mg of eculizumab, or an antigen-binding fragment thereof, and once every six months thereafter. In one embodiment, the dsRNA agent is chronically administered to the subject at a 400 mg fixed dose of the dsRNA agent once every month. In one aspect, the present invention provides methods for treating, e.g., chronically treating, a subject having paroxysmal nocturnal hemoglobinuria (PNH). The methods include administering to a subject having PNH and previously treated with eculizumab a 400 mg fixed dose of a double stranded ribonucleic acid (dsRNA) agent for inhibiting expression of complement component C5 once every week for 2-8 weeks; and administering to the subject, a dose of about 300 mg to about 900 mg of eculizumab, or an antigen-binding fragment thereof, once every four weeks, wherein the dsRNA agent comprises a sense strand and an antisense strand, and wherein the sense strand comprises 5′-asasGfcAfaGfaUfAfUfuUfuuAfuAfaua-3′ (SEQ ID NO:2876) and the antisense strand comprises 5′-usAfsUfuAfuaAfaAfauaUfcUfuGfcuususudTdT-3′ (SEQ ID NO:2889), wherein a, g, c and u are 2′-O-methyl (2′-OMe) A, G, C, and U, respectively; Af, Gf, Cf and Uf are 2′-fluoro A, G, C and U, respectively; dT is a deoxy-thymine nucleotide; and s is a phosphorothioate linkage, thereby treating the subject. In one embodiment, the dsRNA agent is administered to the subject a 400 mg fixed dose once every week for 2-8 weeks prior to the administration of the dose of about 300 mg to about 900 mg of eculizumab, or an antigen-binding fragment thereof, to the subject. In one embodiment, the dsRNA agent is administered to the subject a 400 mg fixed dose once every week for 2-8 weeks prior to the administration of the dose of about 300 mg to about 900 mg of eculizumab, or an antigen-binding fragment thereof, to the subject, and once every month thereafter. In one embodiment, the dsRNA agent is administered to the subject a 400 mg fixed dose once every week for 2-8 weeks prior to the administration of the dose of about 300 mg to about 900 mg of eculizumab, or an antigen-binding fragment thereof, to the subject, and once every three months thereafter. In one embodiment, the dsRNA agent is administered to the subject a 400 mg fixed dose once every week for 2-8 weeks prior to the administration of the dose of about 300 mg to about 900 mg of eculizumab, or an antigen-binding fragment thereof, to the subject, and once every six months thereafter. In one embodiment, the dsRNA agent is chronically administered to the subject at a 400 mg fixed dose of the dsRNA agent once every week.

[0035] In one aspect, the present invention provides methods for treating, e.g., chronically treating, a subject having paroxysmal nocturnal hemoglobinuria (PNH). The methods include administering to a subject having PNH and previously treated with eculizumab a 400 mg fixed dose of a double stranded ribonucleic acid (dsRNA) agent for inhibiting expression of complement component C5 once every week for 2-8 weeks; and administering to the subject, a dose of about 300 mg of eculizumab, or an antigen-binding fragment thereof, once every four weeks, wherein the dsRNA agent comprises a sense strand and an antisense strand, and wherein the sense strand comprises 5′-asasGfcAfaGfaUfAfUfuUfuuAfuAfaua-3′ (SEQ ID NO:2876) and the antisense strand comprises 5′-usAfsUfuAfuaAfaAfauaUfcUfuGfcuususudTdT-3′ (SEQ ID NO:2889), wherein a, g, c and u are 2′-O-methyl (2′-OMe) A, G, C, and U, respectively; Af, Gf, Cf and Uf are 2′-fluoro A, G, C and U, respectively; dT is a deoxy-thymine nucleotide; and s is a phosphorothioate linkage, thereby treating the subject. In one embodiment, the dsRNA agent is administered to the subject a 400 mg fixed dose once every week for 2-8 weeks prior to the administration of the dose of about 300 mg of eculizumab, or an antigen-binding fragment thereof, to the subject. In one embodiment, the dsRNA agent is administered to the subject a 400 mg fixed dose once every week for 2-8 weeks prior to the administration of the dose of about 300 mg of eculizumab, or an antigen-binding fragment thereof, to the subject, and once every month thereafter. In one embodiment, the dsRNA agent is administered to the subject a 400 mg fixed dose once every week for 2-8 weeks prior to the administration of the dose of about 300 mg of eculizumab, or an antigen-binding fragment thereof, to the subject, and once every three months thereafter. In one embodiment, the dsRNA agent is administered to the subject a 400 mg fixed dose once every week for 2-8 weeks prior to the administration of the dose of about 300 mg of eculizumab, or an antigen-binding fragment thereof, to the subject, and once every six months thereafter. In one embodiment, the dsRNA agent is chronically administered to the subject at a 400 mg fixed dose of the dsRNA agent once every week.

[0036] In one aspect, the present invention provides methods for treating, e.g., chronically treating, a subject having paroxysmal nocturnal hemoglobinuria (PNH). The methods include administering to a subject having PNH and previously treated with eculizumab a 400 mg fixed dose of a double stranded ribonucleic acid (dsRNA) agent for inhibiting expression of complement component C5 once every week for 2-8 weeks; and administering to the subject, a dose of about 600 mg of eculizumab, or an antigen-binding fragment thereof, once very four weeks, wherein the dsRNA agent comprises a sense strand and an antisense strand, and wherein the sense strand comprises 5′-asasGfcAfaGfaUfAfUfuUfuuAfuAfaua-3′ (SEQ ID NO:2876) and the antisense strand comprises 5′-usAfsUfuAfuaAfaAfauaUfcUfuGfcuususudTdT-3′ (SEQ ID NO:2889), wherein a, g, c and u are 2′-O-methyl (2′-OMe) A, G, C, and U, respectively; Af, Gf, Cf and Uf are 2′-fluoro A, G, C and U, respectively; dT is a deoxy-thymine nucleotide; and s is a phosphorothioate linkage, thereby treating the subject. In one embodiment, the dsRNA agent is administered to the subject a 400 mg fixed dose once every week for 2-8 weeks prior to the administration of the dose of about 600 mg of eculizumab, or an antigen-binding fragment thereof, to the subject. In one embodiment, the dsRNA agent is administered to the subject a 400 mg fixed dose once every week for 2-8 weeks prior to the administration of the dose of about 600 mg of eculizumab, or an antigen-binding fragment thereof, to the subject, and once every month thereafter. In one embodiment, the dsRNA agent is administered to the subject a 400 mg fixed dose once every week for 2-8 weeks prior to the administration of the dose of about 600 mg of eculizumab, or an antigen-binding fragment thereof, to the subject, and once every three months thereafter. In one embodiment, the dsRNA agent is administered to the subject a 400 mg fixed dose once every week for 2-8 weeks prior to the administration of the dose of about 600 mg of eculizumab, or an antigen-binding fragment thereof, to the subject, and once every six months thereafter. In one embodiment, the dsRNA agent is chronically administered to the subject at a 400 mg fixed dose of the dsRNA agent once every week.

[0037] In one aspect, the present invention provides methods for treating, e.g., chronically treating, a subject having paroxysmal nocturnal hemoglobinuria (PNH). The methods include administering to a subject having PNH and previously treated with eculizumab a 400 mg fixed dose of a double stranded ribonucleic acid (dsRNA) agent for inhibiting expression of complement component C5 once every week for 2-8 weeks; and administering to the subject, a dose of about 900 mg of eculizumab, or an antigen-binding fragment thereof, once every four weeks, wherein the dsRNA agent comprises a sense strand and an antisense strand, and wherein the sense strand comprises 5′-asasGfcAfaGfaUfAfUfuUfuuAfuAfaua-3′ (SEQ ID NO:2876) and the antisense strand comprises 5′-usAfsUfuAfuaAfaAfauaUfcUfuGfcuususudTdT-3′ (SEQ ID NO:2889), wherein a, g, c and u are 2′-O-methyl (2′-OMe) A, G, C, and U, respectively; Af, Gf, Cf and Uf are 2′-fluoro A, G, C and U, respectively; dT is a deoxy-thymine nucleotide; and s is a phosphorothioate linkage, thereby treating the subject. In one embodiment, the dsRNA agent is administered to the subject a 400 mg fixed dose once every week for 2-8 weeks prior to the administration of the dose of about 900 mg of eculizumab, or an antigen-binding fragment thereof, to the subject. In one embodiment, the dsRNA agent is administered to the subject a 400 mg fixed dose once every week for 2-8 weeks prior to the administration of the dose of about 900 mg of eculizumab, or an antigen-binding fragment thereof, to the subject, and once every month thereafter. In one embodiment, the dsRNA agent is administered to the subject a 400 mg fixed dose once every week for 2-8 weeks prior to the administration of the dose of about 900 mg of eculizumab, or an antigen-binding fragment thereof, to the subject, and once every three months thereafter. In one embodiment, the dsRNA agent is administered to the subject a 400 mg fixed dose once every week for 2-8 weeks prior to the administration of the dose of about 900 mg of eculizumab, or an antigen-binding fragment thereof, to the subject, and once every six months thereafter. In one embodiment, the dsRNA agent is chronically administered to the subject at a 400 mg fixed dose of the dsRNA agent once every week. In another aspect, the present invention provides methods for treating, e.g., chronically treating, a subject having paroxysmal nocturnal hemoglobinuria (PNH). The methods include administering to a subject having PNH and previously treated with eculizumab, a 400 mg fixed dose of a double stranded ribonucleic acid (dsRNA) agent for inhibiting expression of complement component C5 once every month for 1-2 months; and administering to the subject, a dose of about 300 mg to about 900 mg of eculizumab, or an antigen-binding fragment thereof, once every four weeks, wherein the dsRNA agent comprises a sense strand and an antisense strand, and wherein the sense strand comprises 5′-asasGfcAfaGfaUfAfUfuUfuuAfuAfaua-3′ (SEQ ID NO:2876) and the antisense strand comprises 5′-usAfsUfuAfuaAfaAfauaUfcUfuGfcuususudTdT-3′ (SEQ ID NO:2889), wherein a, g, c and u are 2′-O-methyl (2′-OMe) A, G, C, and U, respectively; Af, Gf, Cf and Uf are 2′-fluoro A, G, C and U, respectively; dT is a deoxy-thymine nucleotide; and s is a phosphorothioate linkage, thereby treating the subject. In one embodiment, the dsRNA agent is administered to the subject at a 400 mg fixed dose once every month for 1-2 months prior to the administration of the dose of about 300 mg to about 900 mg of eculizumab, or an antigen-binding fragment thereof, to the subject. In one embodiment, the dsRNA agent is administered to the subject at a 400 mg fixed dose once every month for 1-2 months prior to the administration of the dose of about 300 mg to about 900 mg of eculizumab, or an antigen-binding fragment thereof, to the subject, and once every three months thereafter. In one embodiment, the dsRNA agent is administered to the subject at a 400 mg fixed dose once every month for 1-2 months prior to the administration of the dose of about 300 mg to about 900 mg of eculizumab, or an antigen-binding fragment thereof, to the subject, and once every six months thereafter. In one embodiment, the dsRNA agent is chronically administered to the subject at a 400 mg fixed dose of the dsRNA agent once every month.

[0038] In another aspect, the present invention provides methods for treating, e.g., chronically treating, a subject having paroxysmal nocturnal hemoglobinuria (PNH). The methods include administering to a subject having PNH and previously treated with eculizumab, a 400 mg fixed dose of a double stranded ribonucleic acid (dsRNA) agent for inhibiting expression of complement component C5 once every month for 1-2 months; and administering to the subject, a dose of about 300 mg of eculizumab, or an antigen-binding fragment thereof, once every four weeks, wherein the dsRNA agent comprises a sense strand and an antisense strand, and wherein the sense strand comprises 5′-asasGfcAfaGfaUfAfUfuUfuuAfuAfaua-3′ (SEQ ID NO:2876) and the antisense strand comprises 5′-usAfsUfuAfuaAfaAfauaUfcUfuGfcuususudTdT-3′ (SEQ ID NO:2889), wherein a, g, c and u are 2′-O-methyl (2′-OMe) A, G, C, and U, respectively; Af, Gf, Cf and Uf are 2′-fluoro A, G, C and U, respectively; dT is a deoxy-thymine nucleotide; and s is a phosphorothioate linkage, thereby treating the subject. In one embodiment, the dsRNA agent is administered to the subject at a 400 mg fixed dose once every month for 1-2 months prior to the administration of the dose of about 300 mg of eculizumab, or an antigen-binding fragment thereof, to the subject. In one embodiment, the dsRNA agent is administered to the subject at a 400 mg fixed dose once every month for 1-2 months prior to the administration of the dose of about 300 mg of eculizumab, or an antigen-binding fragment thereof, to the subject, and once every three months thereafter. In one embodiment, the dsRNA agent is administered to the subject at a 400 mg fixed dose once every month for 1-2 months prior to the administration of the dose of about 300 mg of eculizumab, or an antigen-binding fragment thereof, to the subject, and once every six months thereafter. In one embodiment, the dsRNA agent is chronically administered to the subject at a 400 mg fixed dose of the dsRNA agent once every month.

[0039] In another aspect, the present invention provides methods for treating, e.g., chronically treating, a subject having paroxysmal nocturnal hemoglobinuria (PNH). The methods include administering to a subject having PNH and previously treated with eculizumab, a 400 mg fixed dose of a double stranded ribonucleic acid (dsRNA) agent for inhibiting expression of complement component C5 once every month for 1-2 months; and administering to the subject, a dose of about 600 mg of eculizumab, or an antigen-binding fragment thereof, once every four weeks, wherein the dsRNA agent comprises a sense strand and an antisense strand, and wherein the sense strand comprises 5′-asasGfcAfaGfaUfAfUfuUfuuAfuAfaua-3′ (SEQ ID NO:2876) and the antisense strand comprises 5′-usAfsUfuAfuaAfaAfauaUfcUfuGfcuususudTdT-3′ (SEQ ID NO:2889), wherein a, g, c and u are 2′-O-methyl (2′-OMe) A, G, C, and U, respectively; Af, Gf, Cf and Uf are 2′-fluoro A, G, C and U, respectively; dT is a deoxy-thymine nucleotide; and s is a phosphorothioate linkage, thereby treating the subject. In one embodiment, the dsRNA agent is administered to the subject at a 400 mg fixed dose once every month for 1-2 months prior to the administration of the dose of about 600 mg of eculizumab, or an antigen-binding fragment thereof, to the subject. In one embodiment, the dsRNA agent is administered to the subject at a 400 mg fixed dose once every month for 1-2 months prior to the administration of the dose of about 600 mg of eculizumab, or an antigen-binding fragment thereof, to the subject, and once every three months thereafter. In one embodiment, the dsRNA agent is administered to the subject at a 400 mg fixed dose once every month for 1-2 months prior to the administration of the dose of about 600 mg of eculizumab, or an antigen-binding fragment thereof, to the subject, and once every six months thereafter. In one embodiment, the dsRNA agent is chronically administered to the subject at a 400 mg fixed dose of the dsRNA agent once every month.

[0040] In another aspect, the present invention provides methods for treating, e.g., chronically treating, a subject having paroxysmal nocturnal hemoglobinuria (PNH). The methods include administering to a subject having PNH and previously treated with eculizumab, a 400 mg fixed dose of a double stranded ribonucleic acid (dsRNA) agent for inhibiting expression of complement component C5 once every month for 1-2 months; and administering to the subject, a dose of about 900 mg of eculizumab, or an antigen-binding fragment thereof, once every four weeks, wherein the dsRNA agent comprises a sense strand and an antisense strand, and wherein the sense strand comprises 5′-asasGfcAfaGfaUfAfUfuUfuuAfuAfaua-3′ (SEQ ID NO:2876) and the antisense strand comprises 5′-usAfsUfuAfuaAfaAfauaUfcUfuGfcuususudTdT-3′ (SEQ ID NO:2889), wherein a, g, c and u are 2′-O-methyl (2′-OMe) A, G, C, and U, respectively; Af, Gf, Cf and Uf are 2′-fluoro A, G, C and U, respectively; dT is a deoxy-thymine nucleotide; and s is a phosphorothioate linkage, thereby treating the subject. In one embodiment, the dsRNA agent is administered to the subject at a 400 mg fixed dose once every month for 1-2 months prior to the administration of the dose of about 300 mg of eculizumab, or an antigen-binding fragment thereof, to the subject. In one embodiment, the dsRNA agent is administered to the subject at a 400 mg fixed dose once every month for 1-2 months prior to the administration of the dose of about 300 mg of eculizumab, or an antigen-binding fragment thereof, to the subject, and once every three months thereafter. In one embodiment, the dsRNA agent is administered to the subject at a 400 mg fixed dose once every month for 1-2 months prior to the administration of the dose of about 300 mg of eculizumab, or an antigen-binding fragment thereof, to the subject, and once every six months thereafter. In one embodiment, the dsRNA agent is chronically administered to the subject at a 400 mg fixed dose of the dsRNA agent once every month.

[0041] In one aspect, the present invention provides methods for treating, e.g., chronically treating, a subject having paroxysmal nocturnal hemoglobinuria (PNH). The methods include administering to a subject having PNH and previously treated with eculizumab a 200 mg fixed dose of a double stranded ribonucleic acid (dsRNA) agent for inhibiting expression of complement component C5 once every week; and administering to the subject, a dose of about 300 mg to about 900 mg of eculizumab, or an antigen-binding fragment thereof, once every four weeks, wherein the dsRNA agent comprises a sense strand and an antisense strand, and wherein the sense strand comprises 5′-asasGfcAfaGfaUfAfUfuUfuuAfuAfaua-3′ (SEQ ID NO:2876) and the antisense strand comprises 5′-usAfsUfuAfuaAfaAfauaUfcUfuGfcuususudTdT-3′ (SEQ ID NO:2889), wherein a, g, c and u are 2′-O-methyl (2′-OMe) A, G, C, and U, respectively; Af, Gf, Cf and Uf are 2′-fluoro A, G, C and U, respectively; dT is a deoxy-thymine nucleotide; and s is a phosphorothioate linkage, thereby treating the subject. In one embodiment, the dsRNA agent is administered to the subject at a 200 mg fixed dose of the dsRNA agent once every week for eight weeks, e.g., prior to the administration of the dose of about 300 mg to about 900 mg of eculizumab, or an antigen-binding fragment thereof, to the subject. In another embodiment, the dsRNA agent is administered to the subject at a 200 mg fixed dose of the dsRNA agent once every week for twelve weeks, e.g., prior to the administration of the dose of about 300 mg to about 900 mg of eculizumab, or an antigen-binding fragment thereof, to the subject. In one embodiment, the dsRNA agent is administered to the subject at a 200 mg fixed dose of the dsRNA agent once every week for eight weeks, e.g., prior to administration of the dose of about 300 mg to about 900 mg of eculizumab, or an antigen-binding fragment thereof, and once every month thereafter. In one embodiment, the dsRNA agent is administered to the subject at a 200 mg fixed dose of the dsRNA agent once every weeks for eight weeks, e.g., prior to administration of the dose of about 300 mg to about 900 mg of eculizumab, or an antigen-binding fragment thereof, and once every three months thereafter. In one embodiment, the dsRNA agent is administered to the subject at a 200 mg fixed dose of the dsRNA agent once every weeks for eight weeks, e.g., prior to administration of the dose of about 300 mg to about 900 mg of eculizumab, or an antigen-binding fragment thereof, and once every six months thereafter. In one embodiment, the dsRNA agent is administered to the subject at a 200 mg fixed dose of the dsRNA agent once every week for twelve weeks, e.g., prior to administration of the dose of about 300 mg to about 900 mg of eculizumab, or an antigen-binding fragment thereof, and once every month thereafter. In one embodiment, the dsRNA agent is administered to the subject at a 200 mg fixed dose of the dsRNA agent once every weeks for twelve weeks, e.g., prior to administration of the dose of about 300 mg to about 900 mg of eculizumab, or an antigen-binding fragment thereof, and once every three months thereafter. In one embodiment, the dsRNA agent is administered to the subject at a 200 mg fixed dose of the dsRNA agent once every weeks for twelve weeks, e.g., prior to administration of the dose of about 300 mg to about 900 mg of eculizumab, or an antigen-binding fragment thereof, and once every six months thereafter. In one embodiment, the dsRNA agent is chronically administered to the subject at a 200 mg fixed dose of the dsRNA agent once every week.

[0042] In one aspect, the present invention provides methods for treating, e.g., chronically treating, a subject having paroxysmal nocturnal hemoglobinuria (PNH). The methods include administering to a subject having PNH and previously treated with eculizumab a 200 mg fixed dose of a double stranded ribonucleic acid (dsRNA) agent for inhibiting expression of complement component C5 once every week; and administering to the subject, a dose of about 300 mg of eculizumab, or an antigen-binding fragment thereof, once every four weeks, wherein the dsRNA agent comprises a sense strand and an antisense strand, and wherein the sense strand comprises 5′-asasGfcAfaGfaUfAfUfuUfuuAfuAfaua-3′ (SEQ ID NO:2876) and the antisense strand comprises 5′-usAfsUfuAfuaAfaAfauaUfcUfuGfcuususudTdT-3′ (SEQ ID NO:2889), wherein a, g, c and u are 2′-O-methyl (2′-OMe) A, G, C, and U, respectively; Af, Gf, Cf and Uf are 2′-fluoro A, G, C and U, respectively; dT is a deoxy-thymine nucleotide; and s is a phosphorothioate linkage, thereby treating the subject. In one embodiment, the dsRNA agent is administered to the subject at a 200 mg fixed dose of the dsRNA agent once every week for eight weeks, e.g., prior to the administration of the dose of about 300 mg of eculizumab, or an antigen-binding fragment thereof, to the subject. In another embodiment, the dsRNA agent is administered to the subject at a 200 mg fixed dose of the dsRNA agent once every week for twelve weeks, e.g., prior to the administration of the dose of about 300 mg of eculizumab, or an antigen-binding fragment thereof, to the subject. In one embodiment, the dsRNA agent is administered to the subject at a 200 mg fixed dose of the dsRNA agent once every week for eight weeks, e.g., prior to administration of the dose of about 300 mg of eculizumab, or an antigen-binding fragment thereof, and once every month thereafter. In one embodiment, the dsRNA agent is administered to the subject at a 200 mg fixed dose of the dsRNA agent once every weeks for eight weeks, e.g., prior to administration of the dose of about 300 mg of eculizumab, or an antigen-binding fragment thereof, and once every three months thereafter. In one embodiment, the dsRNA agent is administered to the subject at a 200 mg fixed dose of the dsRNA agent once every weeks for eight weeks, e.g., prior to administration of the dose of about 300 mg of eculizumab, or an antigen-binding fragment thereof, and once every six months thereafter. In one embodiment, the dsRNA agent is administered to the subject at a 200 mg fixed dose of the dsRNA agent once every week for twelve weeks, e.g., prior to administration of the dose of about 300 mg of eculizumab, or an antigen-binding fragment thereof, and once every month thereafter. In one embodiment, the dsRNA agent is administered to the subject at a 200 mg fixed dose of the dsRNA agent once every weeks for twelve weeks, e.g., prior to administration of the dose of about 300 mg of eculizumab, or an antigen-binding fragment thereof, and once every three months thereafter. In one embodiment, the dsRNA agent is administered to the subject at a 200 mg fixed dose of the dsRNA agent once every weeks for twelve weeks, e.g., prior to administration of the dose of about 300 mg of eculizumab, or an antigen-binding fragment thereof, and once every six months thereafter. In one embodiment, the dsRNA agent is chronically administered to the subject at a 200 mg fixed dose of the dsRNA agent once every week.

[0043] In one aspect, the present invention provides methods for treating, e.g., chronically treating, a subject having paroxysmal nocturnal hemoglobinuria (PNH). The methods include administering to a subject having PNH and previously treated with eculizumab a 200 mg fixed dose of a double stranded ribonucleic acid (dsRNA) agent for inhibiting expression of complement component C5 once every week; and administering to the subject, a dose of about 600 mg of eculizumab, or an antigen-binding fragment thereof, once every four weeks, wherein the dsRNA agent comprises a sense strand and an antisense strand, and wherein the sense strand comprises 5′-asasGfcAfaGfaUfAfUfuUfuuAfuAfaua-3′ (SEQ ID NO:2876) and the antisense strand comprises 5′-usAfsUfuAfuaAfaAfauaUfcUfuGfcuususudTdT-3′ (SEQ ID NO:2889), wherein a, g, c and u are 2′-O-methyl (2′-OMe) A, G, C, and U, respectively; Af, Gf, Cf and Uf are 2′-fluoro A, G, C and U, respectively; dT is a deoxy-thymine nucleotide; and s is a phosphorothioate linkage, thereby treating the subject. In one embodiment, the dsRNA agent is administered to the subject at a 200 mg fixed dose of the dsRNA agent once every week for eight weeks, e.g., prior to the administration of the dose of about 600 mg of eculizumab, or an antigen-binding fragment thereof, to the subject. In another embodiment, the dsRNA agent is administered to the subject at a 200 mg fixed dose of the dsRNA agent once every week for twelve weeks, e.g., prior to the administration of the dose of about 600 mg of eculizumab, or an antigen-binding fragment thereof, to the subject. In one embodiment, the dsRNA agent is administered to the subject at a 200 mg fixed dose of the dsRNA agent once every week for eight weeks, e.g., prior to administration of the dose of about 600 mg tmg of eculizumab, or an antigen-binding fragment thereof, and once every month thereafter. In one embodiment, the dsRNA agent is administered to the subject at a 200 mg fixed dose of the dsRNA agent once every weeks for eight weeks, e.g., prior to administration of the dose of about 600 mg of eculizumab, or an antigen-binding fragment thereof, and once every three months thereafter. In one embodiment, the dsRNA agent is administered to the subject at a 200 mg fixed dose of the dsRNA agent once every weeks for eight weeks, e.g., prior to administration of the dose of about 600 mg of eculizumab, or an antigen-binding fragment thereof, and once every six months thereafter. In one embodiment, the dsRNA agent is administered to the subject at a 200 mg fixed dose of the dsRNA agent once every week for twelve weeks, e.g., prior to administration of the dose of about 600 mg of eculizumab, or an antigen-binding fragment thereof, and once every month thereafter. In one embodiment, the dsRNA agent is administered to the subject at a 200 mg fixed dose of the dsRNA agent once every weeks for twelve weeks, e.g., prior to administration of the dose of about 600 mg of eculizumab, or an antigen-binding fragment thereof, and once every three months thereafter. In one embodiment, the dsRNA agent is administered to the subject at a 200 mg fixed dose of the dsRNA agent once every weeks for twelve weeks, e.g., prior to administration of the dose of about 600 mg of eculizumab, or an antigen-binding fragment thereof, and once every six months thereafter. In one embodiment, the dsRNA agent is chronically administered to the subject at a 200 mg fixed dose of the dsRNA agent once every week.

[0044] In one aspect, the present invention provides methods for treating, e.g., chronically treating, a subject having paroxysmal nocturnal hemoglobinuria (PNH). The methods include administering to a subject having PNH and previously treated with eculizumab a 200 mg fixed dose of a double stranded ribonucleic acid (dsRNA) agent for inhibiting expression of complement component C5 once every week; and administering to the subject, a dose of about 900 mg of eculizumab, or an antigen-binding fragment thereof, once every four weeks, wherein the dsRNA agent comprises a sense strand and an antisense strand, and wherein the sense strand comprises 5′-asasGfcAfaGfaUfAfUfuUfuuAfuAfaua-3′ (SEQ ID NO:2876) and the antisense strand comprises 5′-usAfsUfuAfuaAfaAfauaUfcUfuGfcuususudTdT-3′ (SEQ ID NO:2889), wherein a, g, c and u are 2′-O-methyl (2′-OMe) A, G, C, and U, respectively; Af, Gf, Cf and Uf are 2′-fluoro A, G, C and U, respectively; dT is a deoxy-thymine nucleotide; and s is a phosphorothioate linkage, thereby treating the subject. In one embodiment, the dsRNA agent is administered to the subject at a 200 mg fixed dose of the dsRNA agent once every week for eight weeks, e.g., prior to the administration of the dose of about 900 mg of eculizumab, or an antigen-binding fragment thereof, to the subject. In another embodiment, the dsRNA agent is administered to the subject at a 200 mg fixed dose of the dsRNA agent once every week for twelve weeks, e.g., prior to the administration of the dose of about 900 mg of eculizumab, or an antigen-binding fragment thereof, to the subject. In one embodiment, the dsRNA agent is administered to the subject at a 200 mg fixed dose of the dsRNA agent once every week for eight weeks, e.g., prior to administration of the dose of about 900 mg of eculizumab, or an antigen-binding fragment thereof, and once every month thereafter. In one embodiment, the dsRNA agent is administered to the subject at a 200 mg fixed dose of the dsRNA agent once every weeks for eight weeks, e.g., prior to administration of the dose of about 900 mg of eculizumab, or an antigen-binding fragment thereof, and once every three months thereafter. In one embodiment, the dsRNA agent is administered to the subject at a 200 mg fixed dose of the dsRNA agent once every weeks for eight weeks, e.g., prior to administration of the dose of about 900 mg of eculizumab, or an antigen-binding fragment thereof, and once every six months thereafter. In one embodiment, the dsRNA agent is administered to the subject at a 200 mg fixed dose of the dsRNA agent once every week for twelve weeks, e.g., prior to administration of the dose of about 900 mg of eculizumab, or an antigen-binding fragment thereof, and once every month thereafter. In one embodiment, the dsRNA agent is administered to the subject at a 200 mg fixed dose of the dsRNA agent once every weeks for twelve weeks, e.g., prior to administration of the dose of about 900 mg of eculizumab, or an antigen-binding fragment thereof, and once every three months thereafter. In one embodiment, the dsRNA agent is administered to the subject at a 200 mg fixed dose of the dsRNA agent once every weeks for twelve weeks, e.g., prior to administration of the dose of about 900 mg of eculizumab, or an antigen-binding fragment thereof, and once every six months thereafter. In one embodiment, the dsRNA agent is chronically administered to the subject at a 200 mg fixed dose of the dsRNA agent once every week.

[0045] In another aspect, the present invention provides methods for treating, e.g., chronically treating, a subject having paroxysmal nocturnal hemoglobinuria (PNH). The methods include administering to a subject having PNH and previously treated with eculizumab, a 200 mg fixed dose of a double stranded ribonucleic acid (dsRNA) agent for inhibiting expression of complement component C5 once every month; and administering to the subject, a dose of about 300 mg to about 900 mg of eculizumab, or an antigen-binding fragment thereof, once every four weeks, wherein the dsRNA agent comprises a sense strand and an antisense strand, and wherein the sense strand comprises 5′-asasGfcAfaGfaUfAfUfuUfuuAfuAfaua-3′ (SEQ ID NO:2876) and the antisense strand comprises 5′-usAfsUfuAfuaAfaAfauaUfcUfuGfcuususudTdT-3′ (SEQ ID NO:2889), wherein a, g, c and u are 2′-O-methyl (2′-OMe) A, G, C, and U, respectively; Af, Gf, Cf and Uf are 2′-fluoro A, G, C and U, respectively; dT is a deoxy-thymine nucleotide; and s is a phosphorothioate linkage, thereby treating the subject. In one embodiment, the dsRNA agent is administered to the subject at a 200 mg fixed dose of the dsRNA agent once every month for two months, e.g., prior to the administration of the dose of about 300 mg to about 900 mg of eculizumab, or an antigen-binding fragment thereof, to the subject. In one embodiment, the dsRNA agent is administered to the subject at a 200 mg fixed dose of the dsRNA agent once every month for two months, e.g., prior to the administration of the dose of about 300 mg to about 900 mg of eculizumab, or an antigen-binding fragment thereof, to the subject, and once every three months thereafter. In one embodiment, the dsRNA agent is administered to the subject at a 200 mg fixed dose of the dsRNA agent once every month for two months, e.g., prior to the administration of the dose of about 300 mg to about 900 mg of eculizumab, or an antigen-binding fragment thereof, to the subject, and once every six months thereafter. In another embodiment, the dsRNA agent is administered to the subject at a 200 mg fixed dose of the dsRNA agent once every month for three months, e.g., prior to the administration of the dose of about 300 mg to about 900 mg of eculizumab, or an antigen-binding fragment thereof, to the subject. In one embodiment, the dsRNA agent is administered to the subject at a 200 mg fixed dose of the dsRNA agent once every month for three months, e.g., prior to the administration of the dose of about 300 mg to about 900 mg of eculizumab, or an antigen-binding fragment thereof, to the subject, and once every three months thereafter. In one embodiment, the dsRNA agent is administered to the subject at a 200 mg fixed dose of the dsRNA agent once every month for three months, e.g., prior to the administration of the dose of about 300 mg to about 900 mg of eculizumab, or an antigen-binding fragment thereof, to the subject, and once every six months thereafter. In one embodiment, the dsRNA agent is chronically administered to the subject at a 200 mg fixed dose of the dsRNA agent once every month.

[0046] In another aspect, the present invention provides methods for treating, e.g., chronically treating, a subject having paroxysmal nocturnal hemoglobinuria (PNH). The methods include administering to a subject having PNH and previously treated with eculizumab, a 200 mg fixed dose of a double stranded ribonucleic acid (dsRNA) agent for inhibiting expression of complement component C5 once every month; and administering to the subject, a dose of about 300 mg of eculizumab, or an antigen-binding fragment thereof, once every four weeks, wherein the dsRNA agent comprises a sense strand and an antisense strand, and wherein the sense strand comprises 5′-asasGfcAfaGfaUfAfUfuUfuuAfuAfaua-3′ (SEQ ID NO:2876) and the antisense strand comprises 5′-usAfsUfuAfuaAfaAfauaUfcUfuGfcuususudTdT-3′ (SEQ ID NO:2889), wherein a, g, c and u are 2′-O-methyl (2′-OMe) A, G, C, and U, respectively; Af, Gf, Cf and Uf are 2′-fluoro A, G, C and U, respectively; dT is a deoxy-thymine nucleotide; and s is a phosphorothioate linkage, thereby treating the subject. In one embodiment, the dsRNA agent is administered to the subject at a 200 mg fixed dose of the dsRNA agent once every month for two months, e.g., prior to the administration of the dose of about 300 mg of eculizumab, or an antigen-binding fragment thereof, to the subject. In one embodiment, the dsRNA agent is administered to the subject at a 200 mg fixed dose of the dsRNA agent once every month for two months, e.g., prior to the administration of the dose of about 300 mg of eculizumab, or an antigen-binding fragment thereof, to the subject, and once every three months thereafter. In one embodiment, the dsRNA agent is administered to the subject at a 200 mg fixed dose of the dsRNA agent once every month for two months, e.g., prior to the administration of the dose of about 300 mg of eculizumab, or an antigen-binding fragment thereof, to the subject, and once every six months thereafter. In another embodiment, the dsRNA agent is administered to the subject at a 200 mg fixed dose of the dsRNA agent once every month for three months, e.g., prior to the administration of the dose of about 300 mg of eculizumab, or an antigen-binding fragment thereof, to the subject. In one embodiment, the dsRNA agent is administered to the subject at a 200 mg fixed dose of the dsRNA agent once every month for three months, e.g., prior to the administration of the dose of about 300 mg of eculizumab, or an antigen-binding fragment thereof, to the subject, and once every three months thereafter. In one embodiment, the dsRNA agent is administered to the subject at a 200 mg fixed dose of the dsRNA agent once every month for three months, e.g., prior to the administration of the dose of about 300 mg of eculizumab, or an antigen-binding fragment thereof, to the subject, and once every six months thereafter. In one embodiment, the dsRNA agent is chronically administered to the subject at a 200 mg fixed dose of the dsRNA agent once every month.

[0047] In another aspect, the present invention provides methods for treating, e.g., chronically treating, a subject having paroxysmal nocturnal hemoglobinuria (PNH). The methods include administering to a subject having PNH and previously treated with eculizumab, a 200 mg fixed dose of a double stranded ribonucleic acid (dsRNA) agent for inhibiting expression of complement component C5 once every month; and administering to the subject, a dose of about 600 mg of eculizumab, or an antigen-binding fragment thereof, once every four weeks, wherein the dsRNA agent comprises a sense strand and an antisense strand, and wherein the sense strand comprises 5′-asasGfcAfaGfaUfAfUfuUfuuAfuAfaua-3′ (SEQ ID NO:2876) and the antisense strand comprises 5′-usAfsUfuAfuaAfaAfauaUfcUfuGfcuususudTdT-3′ (SEQ ID NO:2889), wherein a, g, c and u are 2′-O-methyl (2′-OMe) A, G, C, and U, respectively; Af, Gf, Cf and Uf are 2′-fluoro A, G, C and U, respectively; dT is a deoxy-thymine nucleotide; and s is a phosphorothioate linkage, thereby treating the subject. In one embodiment, the dsRNA agent is administered to the subject at a 200 mg fixed dose of the dsRNA agent once every month for two months, e.g., prior to the administration of the dose of about 600 mg of eculizumab, or an antigen-binding fragment thereof, to the subject. In one embodiment, the dsRNA agent is administered to the subject at a 200 mg fixed dose of the dsRNA agent once every month for two months, e.g., prior to the administration of the dose of about 600 mg of eculizumab, or an antigen-binding fragment thereof, to the subject, and once every three months thereafter. In one embodiment, the dsRNA agent is administered to the subject at a 200 mg fixed dose of the dsRNA agent once every month for two months, e.g., prior to the administration of the dose of about 600 mg of eculizumab, or an antigen-binding fragment thereof, to the subject, and once every six months thereafter. In another embodiment, the dsRNA agent is administered to the subject at a 200 mg fixed dose of the dsRNA agent once every month for three months, e.g., prior to the administration of the dose of about 600 mg of eculizumab, or an antigen-binding fragment thereof, to the subject. In one embodiment, the dsRNA agent is administered to the subject at a 200 mg fixed dose of the dsRNA agent once every month for three months, e.g., prior to the administration of the dose of about 600 mg of eculizumab, or an antigen-binding fragment thereof, to the subject, and once every three months thereafter. In one embodiment, the dsRNA agent is administered to the subject at a 200 mg fixed dose of the dsRNA agent once every month for three months, e.g., prior to the administration of the dose of about 600 mg of eculizumab, or an antigen-binding fragment thereof, to the subject, and once every six months thereafter. In one embodiment, the dsRNA agent is chronically administered to the subject at a 200 mg fixed dose of the dsRNA agent once every month.

[0048] In another aspect, the present invention provides methods for treating, e.g., chronically treating, a subject having paroxysmal nocturnal hemoglobinuria (PNH). The methods include administering to a subject having PNH and previously treated with eculizumab, a 200 mg fixed dose of a double stranded ribonucleic acid (dsRNA) agent for inhibiting expression of complement component C5 once every month; and administering to the subject, a dose of about 900 mg of eculizumab, or an antigen-binding fragment thereof, once every four weeks, wherein the dsRNA agent comprises a sense strand and an antisense strand, and wherein the sense strand comprises 5′-asasGfcAfaGfaUfAfUfuUfuuAfuAfaua-3′ (SEQ ID NO:2876) and the antisense strand comprises 5′-usAfsUfuAfuaAfaAfauaUfcUfuGfcuususudTdT-3′ (SEQ ID NO:2889), wherein a, g, c and u are 2′-O-methyl (2′-OMe) A, G, C, and U, respectively; Af, Gf, Cf and Uf are 2′-fluoro A, G, C and U, respectively; dT is a deoxy-thymine nucleotide; and s is a phosphorothioate linkage, thereby treating the subject. In one embodiment, the dsRNA agent is administered to the subject at a 200 mg fixed dose of the dsRNA agent once every month for two months, e.g., prior to the administration of the dose of about 900 mg of eculizumab, or an antigen-binding fragment thereof, to the subject. In one embodiment, the dsRNA agent is administered to the subject at a 200 mg fixed dose of the dsRNA agent once every month for two months, e.g., prior to the administration of the dose of about 900 mg of eculizumab, or an antigen-binding fragment thereof, to the subject, and once every three months thereafter. In one embodiment, the dsRNA agent is administered to the subject at a 200 mg fixed dose of the dsRNA agent once every month for two months, e.g., prior to the administration of the dose of about 900 mg of eculizumab, or an antigen-binding fragment thereof, to the subject, and once every six months thereafter. In another embodiment, the dsRNA agent is administered to the subject at a 200 mg fixed dose of the dsRNA agent once every month for three months, e.g., prior to the administration of the dose of about 900 mg of eculizumab, or an antigen-binding fragment thereof, to the subject. In one embodiment, the dsRNA agent is administered to the subject at a 200 mg fixed dose of the dsRNA agent once every month for three months, e.g., prior to the administration of the dose of about 900 mg of eculizumab, or an antigen-binding fragment thereof, to the subject, and once every three months thereafter. In one embodiment, the dsRNA agent is administered to the subject at a 200 mg fixed dose of the dsRNA agent once every month for three months, e.g., prior to the administration of the dose of about 900 mg of eculizumab, or an antigen-binding fragment thereof, to the subject, and once every six months thereafter. In one embodiment, the dsRNA agent is chronically administered to the subject at a 200 mg fixed dose of the dsRNA agent once every month.

[0049] In one aspect, the present invention provides methods for treating, e.g., chronically treating, a subject having paroxysmal nocturnal hemoglobinuria (PNH). The methods include administering to a subject having PNH and that has not responded to treatment with eculizumab a 200 mg fixed dose of a double stranded ribonucleic acid (dsRNA) agent for inhibiting expression of complement component C5 once every week; and administering to the subject, a dose of about 300 mg to about 900 mg of eculizumab, or an antigen-binding fragment thereof, once every four weeks, wherein the dsRNA agent comprises a sense strand and an antisense strand, and wherein the sense strand comprises 5′-asasGfcAfaGfaUfAfUfuUfuuAfuAfaua-3′ (SEQ ID NO:2876) and the antisense strand comprises 5′-usAfsUfuAfuaAfaAfauaUfcUfuGfcuususudTdT-3′ (SEQ ID NO:2889), wherein a, g, c and u are 2′-O-methyl (2′-OMe) A, G, C, and U, respectively; Af, Gf, Cf and Uf are 2′-fluoro A, G, C and U, respectively; dT is a deoxy-thymine nucleotide; and s is a phosphorothioate linkage, thereby treating the subject. In one embodiment, the dsRNA agent is administered to the subject at a 200 mg fixed dose of the dsRNA agent once every week for eight weeks, e.g., prior to the administration of the dose of about 300 mg to about 900 mg of eculizumab, or an antigen-binding fragment thereof, to the subject. In another embodiment, the dsRNA agent is administered to the subject at a 200 mg fixed dose of the dsRNA agent once every week for twelve weeks, e.g., prior to the administration of the dose of about 300 mg to about 900 mg of eculizumab, or an antigen-binding fragment thereof, to the subject. In one embodiment, the dsRNA agent is administered to the subject at a 200 mg fixed dose of the dsRNA agent once every week for eight weeks, e.g., prior to administration of the dose of about 300 mg to about 900 mg of eculizumab, or an antigen-binding fragment thereof, and once every month thereafter. In one embodiment, the dsRNA agent is administered to the subject at a 200 mg fixed dose of the dsRNA agent once every weeks for eight weeks, e.g., prior to administration of the dose of about 300 mg to about 900 mg of eculizumab, or an antigen-binding fragment thereof, and once every three months thereafter. In one embodiment, the dsRNA agent is administered to the subject at a 200 mg fixed dose of the dsRNA agent once every weeks for eight weeks, e.g., prior to administration of the dose of about 300 mg to about 900 mg of eculizumab, or an antigen-binding fragment thereof, and once every six months thereafter. In one embodiment, the dsRNA agent is administered to the subject at a 200 mg fixed dose of the dsRNA agent once every week for twelve weeks, e.g., prior to administration of the dose of about 300 mg to about 900 mg of eculizumab, or an antigen-binding fragment thereof, and once every month thereafter. In one embodiment, the dsRNA agent is administered to the subject at a 200 mg fixed dose of the dsRNA agent once every weeks for twelve weeks, e.g., prior to administration of the dose of about 300 mg to about 900 mg of eculizumab, or an antigen-binding fragment thereof, and once every three months thereafter. In one embodiment, the dsRNA agent is administered to the subject at a 200 mg fixed dose of the dsRNA agent once every weeks for twelve weeks, e.g., prior to administration of the dose of about 300 mg to about 900 mg of eculizumab, or an antigen-binding fragment thereof, and once every six months thereafter. In one embodiment, the dsRNA agent is chronically administered to the subject at a 200 mg fixed dose of the dsRNA agent once every week.

[0050] In one aspect, the present invention provides methods for treating, e.g., chronically treating, a subject having paroxysmal nocturnal hemoglobinuria (PNH). The methods include administering to a subject having PNH and that has not responded to treatment with eculizumab a 200 mg fixed dose of a double stranded ribonucleic acid (dsRNA) agent for inhibiting expression of complement component C5 once every week; and administering to the subject, a dose of about 300 mg of eculizumab, or an antigen-binding fragment thereof, once every four weeks, wherein the dsRNA agent comprises a sense strand and an antisense strand, and wherein the sense strand comprises 5′-asasGfcAfaGfaUfAfUfuUfuuAfuAfaua-3′ (SEQ ID NO:2876) and the antisense strand comprises 5′-usAfsUfuAfuaAfaAfauaUfcUfuGfcuususudTdT-3′ (SEQ ID NO:2889), wherein a, g, c and u are 2′-O-methyl (2′-OMe) A, G, C, and U, respectively; Af, Gf, Cf and Uf are 2′-fluoro A, G, C and U, respectively; dT is a deoxy-thymine nucleotide; and s is a phosphorothioate linkage, thereby treating the subject. In one embodiment, the dsRNA agent is administered to the subject at a 200 mg fixed dose of the dsRNA agent once every week for eight weeks, e.g., prior to the administration of the dose of about 300 mg of eculizumab, or an antigen-binding fragment thereof, to the subject. In another embodiment, the dsRNA agent is administered to the subject at a 200 mg fixed dose of the dsRNA agent once every week for twelve weeks, e.g., prior to the administration of the dose of about 300 mg of eculizumab, or an antigen-binding fragment thereof, to the subject. In one embodiment, the dsRNA agent is administered to the subject at a 200 mg fixed dose of the dsRNA agent once every week for eight weeks, e.g., prior to administration of the dose of about 300 mg of eculizumab, or an antigen-binding fragment thereof, and once every month thereafter. In one embodiment, the dsRNA agent is administered to the subject at a 200 mg fixed dose of the dsRNA agent once every weeks for eight weeks, e.g., prior to administration of the dose of about 300 mg of eculizumab, or an antigen-binding fragment thereof, and once every three months thereafter. In one embodiment, the dsRNA agent is administered to the subject at a 200 mg fixed dose of the dsRNA agent once every weeks for eight weeks, e.g., prior to administration of the dose of about 300 mg of eculizumab, or an antigen-binding fragment thereof, and once every six months thereafter. In one embodiment, the dsRNA agent is administered to the subject at a 200 mg fixed dose of the dsRNA agent once every week for twelve weeks, e.g., prior to administration of the dose of about 300 mg of eculizumab, or an antigen-binding fragment thereof, and once every month thereafter. In one embodiment, the dsRNA agent is administered to the subject at a 200 mg fixed dose of the dsRNA agent once every week for twelve weeks, e.g., prior to administration of the dose of about 300 mg of eculizumab, or an antigen-binding fragment thereof, and once every three months thereafter. In one embodiment, the dsRNA agent is administered to the subject at a 200 mg fixed dose of the dsRNA agent once every weeks for twelve weeks, e.g., prior to administration of the dose of about 300 mg of eculizumab, or an antigen-binding fragment thereof, and once every six months thereafter. In one embodiment, the dsRNA agent is chronically administered to the subject at a 200 mg fixed dose of the dsRNA agent once every week.

[0051] In one aspect, the present invention provides methods for treating, e.g., chronically treating, a subject having paroxysmal nocturnal hemoglobinuria (PNH). The methods include administering to a subject having PNH and that has not responded to treatment with eculizumab a 200 mg fixed dose of a double stranded ribonucleic acid (dsRNA) agent for inhibiting expression of complement component C5 once every week; and administering to the subject, a dose of about 600 mg of eculizumab, or an antigen-binding fragment thereof, once every four weeks, wherein the dsRNA agent comprises a sense strand and an antisense strand, and wherein the sense strand comprises 5′-asasGfcAfaGfaUfAfUfuUfuuAfuAfaua-3′ (SEQ ID NO:2876) and the antisense strand comprises 5′-usAfsUfuAfuaAfaAfauaUfcUfuGfcuususudTdT-3′ (SEQ ID NO:2889), wherein a, g, c and u are 2′-O-methyl (2′-OMe) A, G, C, and U, respectively; Af, Gf, Cf and Uf are 2′-fluoro A, G, C and U, respectively; dT is a deoxy-thymine nucleotide; and s is a phosphorothioate linkage, thereby treating the subject. In one embodiment, the dsRNA agent is administered to the subject at a 200 mg fixed dose of the dsRNA agent once every week for eight weeks, e.g., prior to the administration of the dose of about 600 mg of eculizumab, or an antigen-binding fragment thereof, to the subject. In another embodiment, the dsRNA agent is administered to the subject at a 200 mg fixed dose of the dsRNA agent once every week for twelve weeks, e.g., prior to the administration of the dose of about 600 mg of eculizumab, or an antigen-binding fragment thereof, to the subject. In one embodiment, the dsRNA agent is administered to the subject at a 200 mg fixed dose of the dsRNA agent once every week for eight weeks, e.g., prior to administration of the dose of about 600 mg of eculizumab, or an antigen-binding fragment thereof, and once every month thereafter. In one embodiment, the dsRNA agent is administered to the subject at a 200 mg fixed dose of the dsRNA agent once every weeks for eight weeks, e.g., prior to administration of the dose of about 600 mg of eculizumab, or an antigen-binding fragment thereof, and once every three months thereafter. In one embodiment, the dsRNA agent is administered to the subject at a 200 mg fixed dose of the dsRNA agent once every weeks for eight weeks, e.g., prior to administration of the dose of about 600 mg of eculizumab, or an antigen-binding fragment thereof, and once every six months thereafter. In one embodiment, the dsRNA agent is administered to the subject at a 200 mg fixed dose of the dsRNA agent once every week for twelve weeks, e.g., prior to administration of the dose of about 600 mg of eculizumab, or an antigen-binding fragment thereof, and once every month thereafter. In one embodiment, the dsRNA agent is administered to the subject at a 200 mg fixed dose of the dsRNA agent once every weeks for twelve weeks, e.g., prior to administration of the dose of about 600 mg of eculizumab, or an antigen-binding fragment thereof, and once every three months thereafter. In one embodiment, the dsRNA agent is administered to the subject at a 200 mg fixed dose of the dsRNA agent once every weeks for twelve weeks, e.g., prior to administration of the dose of about 600 mg of eculizumab, or an antigen-binding fragment thereof, and once every six months thereafter. In one embodiment, the dsRNA agent is chronically administered to the subject at a 200 mg fixed dose of the dsRNA agent once every week.

[0052] In one aspect, the present invention provides methods for treating, e.g., chronically treating, a subject having paroxysmal nocturnal hemoglobinuria (PNH). The methods include administering to a subject having PNH and that has not responded to treatment with eculizumab a 200 mg fixed dose of a double stranded ribonucleic acid (dsRNA) agent for inhibiting expression of complement component C5 once every week; and administering to the subject, a dose of about 900 mg of eculizumab, or an antigen-binding fragment thereof, once every four weeks, wherein the dsRNA agent comprises a sense strand and an antisense strand, and wherein the sense strand comprises 5′-asasGfcAfaGfaUfAfUfuUfuuAfuAfaua-3′ (SEQ ID NO:2876) and the antisense strand comprises 5′-usAfsUfuAfuaAfaAfauaUfcUfuGfcuususudTdT-3′ (SEQ ID NO:2889), wherein a, g, c and u are 2′-O-methyl (2′-OMe) A, G, C, and U, respectively; Af, Gf, Cf and Uf are 2′-fluoro A, G, C and U, respectively; dT is a deoxy-thymine nucleotide; and s is a phosphorothioate linkage, thereby treating the subject. In one embodiment, the dsRNA agent is administered to the subject at a 200 mg fixed dose of the dsRNA agent once every week for eight weeks, e.g., prior to the administration of the dose of about 900 mg of eculizumab, or an antigen-binding fragment thereof, to the subject. In another embodiment, the dsRNA agent is administered to the subject at a 200 mg fixed dose of the dsRNA agent once every week for twelve weeks, e.g., prior to the administration of the dose of about 900 mg of eculizumab, or an antigen-binding fragment thereof, to the subject. In one embodiment, the dsRNA agent is administered to the subject at a 200 mg fixed dose of the dsRNA agent once every week for eight weeks, e.g., prior to administration of the dose of about 900 mg of eculizumab, or an antigen-binding fragment thereof, and once every month thereafter. In one embodiment, the dsRNA agent is administered to the subject at a 200 mg fixed dose of the dsRNA agent once every weeks for eight weeks, e.g., prior to administration of the dose of about 900 mg of eculizumab, or an antigen-binding fragment thereof, and once every three months thereafter. In one embodiment, the dsRNA agent is administered to the subject at a 200 mg fixed dose of the dsRNA agent once every weeks for eight weeks, e.g., prior to administration of the dose of about 900 mg of eculizumab, or an antigen-binding fragment thereof, and once every six months thereafter. In one embodiment, the dsRNA agent is administered to the subject at a 200 mg fixed dose of the dsRNA agent once every week for twelve weeks, e.g., prior to administration of the dose of about 900 mg of eculizumab, or an antigen-binding fragment thereof, and once every month thereafter. In one embodiment, the dsRNA agent is administered to the subject at a 200 mg fixed dose of the dsRNA agent once every weeks for twelve weeks, e.g., prior to administration of the dose of about 900 mg of eculizumab, or an antigen-binding fragment thereof, and once every three months thereafter. In one embodiment, the dsRNA agent is administered to the subject at a 200 mg fixed dose of the dsRNA agent once every weeks for twelve weeks, e.g., prior to administration of the dose of about 900 mg of eculizumab, or an antigen-binding fragment thereof, and once every six months thereafter. In one embodiment, the dsRNA agent is chronically administered to the subject at a 200 mg fixed dose of the dsRNA agent once every week.

[0053] In another aspect, the present invention provides methods for treating, e.g., chronically treating, a subject having paroxysmal nocturnal hemoglobinuria (PNH). The methods include administering to a subject having PNH and that has not responded to treatment with eculizumab, a 200 mg fixed dose of a double stranded ribonucleic acid (dsRNA) agent for inhibiting expression of complement component C5 once every month; and administering to the subject, a dose of about 300 mg to about 900 mg of eculizumab, or an antigen-binding fragment thereof, once every four weeks, wherein the dsRNA agent comprises a sense strand and an antisense strand, and wherein the sense strand comprises 5′-asasGfcAfaGfaUfAfUfuUfuuAfuAfaua-3′ (SEQ ID NO:2876) and the antisense strand comprises 5′-usAfsUfuAfuaAfaAfauaUfcUfuGfcuususudTdT-3′ (SEQ ID NO:2889), wherein a, g, c and u are 2′-O-methyl (2′-OMe) A, G, C, and U, respectively; Af, Gf, Cf and Uf are 2′-fluoro A, G, C and U, respectively; dT is a deoxy-thymine nucleotide; and s is a phosphorothioate linkage, thereby treating the subject. In one embodiment, the dsRNA agent is administered to the subject at a 200 mg fixed dose of the dsRNA agent once every month for two months, e.g., prior to the administration of the dose of about 300 mg to about 900 mg of eculizumab, or an antigen-binding fragment thereof, to the subject. In one embodiment, the dsRNA agent is administered to the subject at a 200 mg fixed dose of the dsRNA agent once every month for two months, e.g., prior to the administration of the dose of about 300 mg to about 900 mg of eculizumab, or an antigen-binding fragment thereof, to the subject, and once every three months thereafter. In one embodiment, the dsRNA agent is administered to the subject at a 200 mg fixed dose of the dsRNA agent once every month for two months, e.g., prior to the administration of the dose of about 300 mg to about 900 mg of eculizumab, or an antigen-binding fragment thereof, to the subject, and once every six months thereafter. In another embodiment, the dsRNA agent is administered to the subject at a 200 mg fixed dose of the dsRNA agent once every month for three months, e.g., prior to the administration of the dose of about 300 mg to about 900 mg of eculizumab, or an antigen-binding fragment thereof, to the subject. In one embodiment, the dsRNA agent is administered to the subject at a 200 mg fixed dose of the dsRNA agent once every month for three months, e.g., prior to the administration of the dose of about 300 mg to about 900 mg of eculizumab, or an antigen-binding fragment thereof, to the subject, and once every three months thereafter. In one embodiment, the dsRNA agent is administered to the subject at a 200 mg fixed dose of the dsRNA agent once every month for three months, e.g., prior to the administration of the dose of about 300 mg to about 900 mg of eculizumab, or an antigen-binding fragment thereof, to the subject, and once every six months thereafter. In one embodiment, the dsRNA agent is chronically administered to the subject at a 200 mg fixed dose of the dsRNA agent once every month.

[0054] In another aspect, the present invention provides methods for treating, e.g., chronically treating, a subject having paroxysmal nocturnal hemoglobinuria (PNH). The methods include administering to a subject having PNH and that has not responded to treatment with eculizumab, a 200 mg fixed dose of a double stranded ribonucleic acid (dsRNA) agent for inhibiting expression of complement component C5 once every month; and administering to the subject, a dose of about 300 mg of eculizumab, or an antigen-binding fragment thereof, once every four weeks, wherein the dsRNA agent comprises a sense strand and an antisense strand, and wherein the sense strand comprises 5′-asasGfcAfaGfaUfAfUfuUfuuAfuAfaua-3′ (SEQ ID NO:2876) and the antisense strand comprises 5′-usAfsUfuAfuaAfaAfauaUfcUfuGfcuususudTdT-3′ (SEQ ID NO:2889), wherein a, g, c and u are 2′-O-methyl (2′-OMe) A, G, C, and U, respectively; Af, Gf, Cf and Uf are 2′-fluoro A, G, C and U, respectively; dT is a deoxy-thymine nucleotide; and s is a phosphorothioate linkage, thereby treating the subject. In one embodiment, the dsRNA agent is administered to the subject at a 200 mg fixed dose of the dsRNA agent once every month for two months, e.g., prior to the administration of the dose of about 300 mg of eculizumab, or an antigen-binding fragment thereof, to the subject. In one embodiment, the dsRNA agent is administered to the subject at a 200 mg fixed dose of the dsRNA agent once every month for two months, e.g., prior to the administration of the dose of about 300 mg of eculizumab, or an antigen-binding fragment thereof, to the subject, and once every three months thereafter. In one embodiment, the dsRNA agent is administered to the subject at a 200 mg fixed dose of the dsRNA agent once every month for two months, e.g., prior to the administration of the dose of about 300 mg of eculizumab, or an antigen-binding fragment thereof, to the subject, and once every six months thereafter. In another embodiment, the dsRNA agent is administered to the subject at a 200 mg fixed dose of the dsRNA agent once every month for three months, e.g., prior to the administration of the dose of about 300 mg of eculizumab, or an antigen-binding fragment thereof, to the subject. In one embodiment, the dsRNA agent is administered to the subject at a 200 mg fixed dose of the dsRNA agent once every month for three months, e.g., prior to the administration of the dose of about 300 mg of eculizumab, or an antigen-binding fragment thereof, to the subject, and once every three months thereafter. In one embodiment, the dsRNA agent is administered to the subject at a 200 mg fixed dose of the dsRNA agent once every month for three months, e.g., prior to the administration of the dose of about 300 mg of eculizumab, or an antigen-binding fragment thereof, to the subject, and once every six months thereafter. In one embodiment, the dsRNA agent is chronically administered to the subject at a 200 mg fixed dose of the dsRNA agent once every month.

[0055] In another aspect, the present invention provides methods for treating, e.g., chronically treating, a subject having paroxysmal nocturnal hemoglobinuria (PNH). The methods include administering to a subject having PNH and that has not responded to treatment with eculizumab, a 200 mg fixed dose of a double stranded ribonucleic acid (dsRNA) agent for inhibiting expression of complement component C5 once every month; and administering to the subject, a dose of about 600 mg of eculizumab, or an antigen-binding fragment thereof, once every four weeks, wherein the dsRNA agent comprises a sense strand and an antisense strand, and wherein the sense strand comprises 5′-asasGfcAfaGfaUfAfUfuUfuuAfuAfaua-3′ (SEQ ID NO:2876) and the antisense strand comprises 5′-usAfsUfuAfuaAfaAfauaUfcUfuGfcuususudTdT-3′ (SEQ ID NO:2889), wherein a, g, c and u are 2′-O-methyl (2′-OMe) A, G, C, and U, respectively; Af, Gf, Cf and Uf are 2′-fluoro A, G, C and U, respectively; dT is a deoxy-thymine nucleotide; and s is a phosphorothioate linkage, thereby treating the subject. In one embodiment, the dsRNA agent is administered to the subject at a 200 mg fixed dose of the dsRNA agent once every month for two months, e.g., prior to the administration of the dose of about 600 mg of eculizumab, or an antigen-binding fragment thereof, to the subject. In one embodiment, the dsRNA agent is administered to the subject at a 200 mg fixed dose of the dsRNA agent once every month for two months, e.g., prior to the administration of the dose of about 600 mg of eculizumab, or an antigen-binding fragment thereof, to the subject, and once every three months thereafter. In one embodiment, the dsRNA agent is administered to the subject at a 200 mg fixed dose of the dsRNA agent once every month for two months, e.g., prior to the administration of the dose of about 600 mg of eculizumab, or an antigen-binding fragment thereof, to the subject, and once every six months thereafter. In another embodiment, the dsRNA agent is administered to the subject at a 200 mg fixed dose of the dsRNA agent once every month for three months, e.g., prior to the administration of the dose of about 600 mg of eculizumab, or an antigen-binding fragment thereof, to the subject. In one embodiment, the dsRNA agent is administered to the subject at a 200 mg fixed dose of the dsRNA agent once every month for three months, e.g., prior to the administration of the dose of about 600 mg of eculizumab, or an antigen-binding fragment thereof, to the subject, and once every three months thereafter. In one embodiment, the dsRNA agent is administered to the subject at a 200 mg fixed dose of the dsRNA agent once every month for three months, e.g., prior to the administration of the dose of about 600 mg of eculizumab, or an antigen-binding fragment thereof, to the subject, and once every six months thereafter. In one embodiment, the dsRNA agent is chronically administered to the subject at a 200 mg fixed dose of the dsRNA agent once every month.

[0056] In another aspect, the present invention provides methods for treating, e.g., chronically treating, a subject having paroxysmal nocturnal hemoglobinuria (PNH). The methods include administering to a subject having PNH and that has not responded to treatment with eculizumab, a 200 mg fixed dose of a double stranded ribonucleic acid (dsRNA) agent for inhibiting expression of complement component C5 once every month; and administering to the subject, a dose of about 900 mg of eculizumab, or an antigen-binding fragment thereof, once every four weeks, wherein the dsRNA agent comprises a sense strand and an antisense strand, and wherein the sense strand comprises 5′-asasGfcAfaGfaUfAfUfuUfuuAfuAfaua-3′ (SEQ ID NO:2876) and the antisense strand comprises 5′-usAfsUfuAfuaAfaAfauaUfcUfuGfcuususudTdT-3′ (SEQ ID NO:2889), wherein a, g, c and u are 2′-O-methyl (2′-OMe) A, G, C, and U, respectively; Af, Gf, Cf and Uf are 2′-fluoro A, G, C and U, respectively; dT is a deoxy-thymine nucleotide; and s is a phosphorothioate linkage, thereby treating the subject. In one embodiment, the dsRNA agent is administered to the subject at a 200 mg fixed dose of the dsRNA agent once every month for two months, e.g., prior to the administration of the dose of about 900 mg of eculizumab, or an antigen-binding fragment thereof, to the subject. In one embodiment, the dsRNA agent is administered to the subject at a 200 mg fixed dose of the dsRNA agent once every month for two months, e.g., prior to the administration of the dose of about 900 mg of eculizumab, or an antigen-binding fragment thereof, to the subject, and once every three months thereafter. In one embodiment, the dsRNA agent is administered to the subject at a 200 mg fixed dose of the dsRNA agent once every month for two months, e.g., prior to the administration of the dose of about 900 mg of eculizumab, or an antigen-binding fragment thereof, to the subject, and once every six months thereafter. In another embodiment, the dsRNA agent is administered to the subject at a 200 mg fixed dose of the dsRNA agent once every month for three months, e.g., prior to the administration of the dose of about 900 mg of eculizumab, or an antigen-binding fragment thereof, to the subject. In one embodiment, the dsRNA agent is administered to the subject at a 200 mg fixed dose of the dsRNA agent once every month for three months, e.g., prior to the administration of the dose of about 900 mg of eculizumab, or an antigen-binding fragment thereof, to the subject, and once every three months thereafter. In one embodiment, the dsRNA agent is administered to the subject at a 200 mg fixed dose of the dsRNA agent once every month for three months, e.g., prior to the administration of the dose of about 900 mg of eculizumab, or an antigen-binding fragment thereof, to the subject, and once every six months thereafter. In one embodiment, the dsRNA agent is chronically administered to the subject at a 200 mg fixed dose of the dsRNA agent once every month. In one aspect, the present invention provides methods for treating, e.g., chronically treating, a subject having paroxysmal nocturnal hemoglobinuria (PNH). The methods include administering to a subject having PNH and that has not responded to treatment with eculizumab a 400 mg fixed dose of a double stranded ribonucleic acid (dsRNA) agent for inhibiting expression of complement component C5 once every week; and administering to the subject, a dose of about 300 mg to about 900 mg of eculizumab, or an antigen-binding fragment thereof, once every four weeks, wherein the dsRNA agent comprises a sense strand and an antisense strand, and wherein the sense strand comprises 5′-asasGfcAfaGfaUfAfUfuUfuuAfuAfaua-3′ (SEQ ID NO:2876) and the antisense strand comprises 5′-usAfsUfuAfuaAfaAfauaUfcUfuGfcuususudTdT-3′ (SEQ ID NO:2889), wherein a, g, c and u are 2′-O-methyl (2′-OMe) A, G, C, and U, respectively; Af, Gf, Cf and Uf are 2′-fluoro A, G, C and U, respectively; dT is a deoxy-thymine nucleotide; and s is a phosphorothioate linkage, thereby treating the subject. In one embodiment, the dsRNA agent is administered to the subject at a 400 mg fixed dose of the dsRNA agent once every week for eight weeks, e.g., prior to the administration of the dose of about 300 mg to about 900 mg of eculizumab, or an antigen-binding fragment thereof, to the subject. In another embodiment, the dsRNA agent is administered to the subject at a 400 mg fixed dose of the dsRNA agent once every week for twelve weeks, e.g., prior to the administration of the dose of about 300 mg to about 900 mg of eculizumab, or an antigen-binding fragment thereof, to the subject. In one embodiment, the dsRNA agent is administered to the subject at a 400 mg fixed dose of the dsRNA agent once every week for eight weeks, e.g., prior to administration of the dose of about 300 mg to about 900 mg of eculizumab, or an antigen-binding fragment thereof, and once every month thereafter. In one embodiment, the dsRNA agent is administered to the subject at a 400 mg fixed dose of the dsRNA agent once every weeks for eight weeks, e.g., prior to administration of the dose of about 300 mg to about 900 mg of eculizumab, or an antigen-binding fragment thereof, and once every three months thereafter. In one embodiment, the dsRNA agent is administered to the subject at a 400 mg fixed dose of the dsRNA agent once every weeks for eight weeks, e.g., prior to administration of the dose of about 300 mg to about 900 mg of eculizumab, or an antigen-binding fragment thereof, and once every six months thereafter. In one embodiment, the dsRNA agent is administered to the subject at a 400 mg fixed dose of the dsRNA agent once every week for twelve weeks, e.g., prior to administration of the dose of about 300 mg to about 900 mg of eculizumab, or an antigen-binding fragment thereof, and once every month thereafter. In one embodiment, the dsRNA agent is administered to the subject at a 400 mg fixed dose of the dsRNA agent once every weeks for twelve weeks, e.g., prior to administration of the dose of about 300 mg to about 900 mg of eculizumab, or an antigen-binding fragment thereof, and once every three months thereafter. In one embodiment, the dsRNA agent is administered to the subject at a 400 mg fixed dose of the dsRNA agent once every weeks for twelve weeks, e.g., prior to administration of the dose of about 300 mg to about 900 mg of eculizumab, or an antigen-binding fragment thereof, and once every six months thereafter. In one embodiment, the dsRNA agent is chronically administered to the subject at a 400 mg fixed dose of the dsRNA agent once every week.

[0057] In one aspect, the present invention provides methods for treating, e.g., chronically treating, a subject having paroxysmal nocturnal hemoglobinuria (PNH). The methods include administering to a subject having PNH and that has not responded to treatment with eculizumab a 400 mg fixed dose of a double stranded ribonucleic acid (dsRNA) agent for inhibiting expression of complement component C5 once every week; and administering to the subject, a dose of about 300 mg of eculizumab, or an antigen-binding fragment thereof, once every four weeks, wherein the dsRNA agent comprises a sense strand and an antisense strand, and wherein the sense strand comprises 5′-asasGfcAfaGfaUfAfUfuUfuuAfuAfaua-3′ (SEQ ID NO:2876) and the antisense strand comprises 5′-usAfsUfuAfuaAfaAfauaUfcUfuGfcuususudTdT-3′ (SEQ ID NO:2889), wherein a, g, c and u are 2′-O-methyl (2′-OMe) A, G, C, and U, respectively; Af, Gf, Cf and Uf are 2′-fluoro A, G, C and U, respectively; dT is a deoxy-thymine nucleotide; and s is a phosphorothioate linkage, thereby treating the subject. In one embodiment, the dsRNA agent is administered to the subject at a 400 mg fixed dose of the dsRNA agent once every week for eight weeks, e.g., prior to the administration of the dose of about 300 mg of eculizumab, or an antigen-binding fragment thereof, to the subject. In another embodiment, the dsRNA agent is administered to the subject at a 400 mg fixed dose of the dsRNA agent once every week for twelve weeks, e.g., prior to the administration of the dose of about 300 mg of eculizumab, or an antigen-binding fragment thereof, to the subject. In one embodiment, the dsRNA agent is administered to the subject at a 400 mg fixed dose of the dsRNA agent once every week for eight weeks, e.g., prior to administration of the dose of about 300 mg eculizumab, or an antigen-binding fragment thereof, and once every month thereafter. In one embodiment, the dsRNA agent is administered to the subject at a 400 mg fixed dose of the dsRNA agent once every weeks for eight weeks, e.g., prior to administration of the dose of about 300 mg of eculizumab, or an antigen-binding fragment thereof, and once every three months thereafter. In one embodiment, the dsRNA agent is administered to the subject at a 400 mg fixed dose of the dsRNA agent once every weeks for eight weeks, e.g., prior to administration of the dose of about 300 mg of eculizumab, or an antigen-binding fragment thereof, and once every six months thereafter. In one embodiment, the dsRNA agent is administered to the subject at a 400 mg fixed dose of the dsRNA agent once every week for twelve weeks, e.g., prior to administration of the dose of about 300 mg of eculizumab, or an antigen-binding fragment thereof, and once every month thereafter. In one embodiment, the dsRNA agent is administered to the subject at a 400 mg fixed dose of the dsRNA agent once every weeks for twelve weeks, e.g., prior to administration of the dose of about 300 mg of eculizumab, or an antigen-binding fragment thereof, and once every three months thereafter. In one embodiment, the dsRNA agent is administered to the subject at a 400 mg fixed dose of the dsRNA agent once every weeks for twelve weeks, e.g., prior to administration of the dose of about 300 mg of eculizumab, or an antigen-binding fragment thereof, and once every six months thereafter. In one embodiment, the dsRNA agent is chronically administered to the subject at a 400 mg fixed dose of the dsRNA agent once every week.

[0058] In one aspect, the present invention provides methods for treating, e.g., chronically treating, a subject having paroxysmal nocturnal hemoglobinuria (PNH). The methods include administering to a subject having PNH and that has not responded to treatment with eculizumab a 400 mg fixed dose of a double stranded ribonucleic acid (dsRNA) agent for inhibiting expression of complement component C5 once every week; and administering to the subject, a dose of about 600 mg of eculizumab, or an antigen-binding fragment thereof, once every four weeks, wherein the dsRNA agent comprises a sense strand and an antisense strand, and wherein the sense strand comprises 5′-asasGfcAfaGfaUfAfUfuUfuuAfuAfaua-3′ (SEQ ID NO:2876) and the antisense strand comprises 5′-usAfsUfuAfuaAfaAfauaUfcUfuGfcuususudTdT-3′ (SEQ ID NO:2889), wherein a, g, c and u are 2′-O-methyl (2′-OMe) A, G, C, and U, respectively; Af, Gf, Cf and Uf are 2′-fluoro A, G, C and U, respectively; dT is a deoxy-thymine nucleotide; and s is a phosphorothioate linkage, thereby treating the subject. In one embodiment, the dsRNA agent is administered to the subject at a 400 mg fixed dose of the dsRNA agent once every week for eight weeks, e.g., prior to the administration of the dose of about 600 mg of eculizumab, or an antigen-binding fragment thereof, to the subject. In another embodiment, the dsRNA agent is administered to the subject at a 400 mg fixed dose of the dsRNA agent once every week for twelve weeks, e.g., prior to the administration of the dose of about 600 mg of eculizumab, or an antigen-binding fragment thereof, to the subject. In one embodiment, the dsRNA agent is administered to the subject at a 400 mg fixed dose of the dsRNA agent once every week for eight weeks, e.g., prior to administration of the dose of about 600 mg eculizumab, or an antigen-binding fragment thereof, and once every month thereafter. In one embodiment, the dsRNA agent is administered to the subject at a 400 mg fixed dose of the dsRNA agent once every weeks for eight weeks, e.g., prior to administration of the dose of about 600 mg of eculizumab, or an antigen-binding fragment thereof, and once every three months thereafter. In one embodiment, the dsRNA agent is administered to the subject at a 400 mg fixed dose of the dsRNA agent once every weeks for eight weeks, e.g., prior to administration of the dose of about 600 mg of eculizumab, or an antigen-binding fragment thereof, and once every six months thereafter. In one embodiment, the dsRNA agent is administered to the subject at a 400 mg fixed dose of the dsRNA agent once every week for twelve weeks, e.g., prior to administration of the dose of about 600 mg of eculizumab, or an antigen-binding fragment thereof, and once every month thereafter. In one embodiment, the dsRNA agent is administered to the subject at a 400 mg fixed dose of the dsRNA agent once every weeks for twelve weeks, e.g., prior to administration of the dose of about 600 mg of eculizumab, or an antigen-binding fragment thereof, and once every three months thereafter. In one embodiment, the dsRNA agent is administered to the subject at a 400 mg fixed dose of the dsRNA agent once every weeks for twelve weeks, e.g., prior to administration of the dose of about 600 mg of eculizumab, or an antigen-binding fragment thereof, and once every six months thereafter. In one embodiment, the dsRNA agent is chronically administered to the subject at a 400 mg fixed dose of the dsRNA agent once every week.

[0059] In one aspect, the present invention provides methods for treating, e.g., chronically treating, a subject having paroxysmal nocturnal hemoglobinuria (PNH). The methods include administering to a subject having PNH and that has not responded to treatment with eculizumab a 400 mg fixed dose of a double stranded ribonucleic acid (dsRNA) agent for inhibiting expression of complement component C5 once every week; and administering to the subject, a dose of about 900 mg of eculizumab, or an antigen-binding fragment thereof, once every four weeks, wherein the dsRNA agent comprises a sense strand and an antisense strand, and wherein the sense strand comprises 5′-asasGfcAfaGfaUfAfUfuUfuuAfuAfaua-3′ (SEQ ID NO:2876) and the antisense strand comprises 5′-usAfsUfuAfuaAfaAfauaUfcUfuGfcuususudTdT-3′ (SEQ ID NO:2889), wherein a, g, c and u are 2′-O-methyl (2′-OMe) A, G, C, and U, respectively; Af, Gf, Cf and Uf are 2′-fluoro A, G, C and U, respectively; dT is a deoxy-thymine nucleotide; and s is a phosphorothioate linkage, thereby treating the subject. In one embodiment, the dsRNA agent is administered to the subject at a 400 mg fixed dose of the dsRNA agent once every week for eight weeks, e.g., prior to the administration of the dose of about 900 mg of eculizumab, or an antigen-binding fragment thereof, to the subject. In another embodiment, the dsRNA agent is administered to the subject at a 400 mg fixed dose of the dsRNA agent once every week for twelve weeks, e.g., prior to the administration of the dose of about 900 mg of eculizumab, or an antigen-binding fragment thereof, to the subject. In one embodiment, the dsRNA agent is administered to the subject at a 400 mg fixed dose of the dsRNA agent once every week for eight weeks, e.g., prior to administration of the dose of about 900 mg eculizumab, or an antigen-binding fragment thereof, and once every month thereafter. In one embodiment, the dsRNA agent is administered to the subject at a 400 mg fixed dose of the dsRNA agent once every weeks for eight weeks, e.g., prior to administration of the dose of about 900 mg of eculizumab, or an antigen-binding fragment thereof, and once every three months thereafter. In one embodiment, the dsRNA agent is administered to the subject at a 400 mg fixed dose of the dsRNA agent once every weeks for eight weeks, e.g., prior to administration of the dose of about 900 mg of eculizumab, or an antigen-binding fragment thereof, and once every six months thereafter. In one embodiment, the dsRNA agent is administered to the subject at a 400 mg fixed dose of the dsRNA agent once every week for twelve weeks, e.g., prior to administration of the dose of about 900 mg of eculizumab, or an antigen-binding fragment thereof, and once every month thereafter. In one embodiment, the dsRNA agent is administered to the subject at a 400 mg fixed dose of the dsRNA agent once every weeks for twelve weeks, e.g., prior to administration of the dose of about 900 mg of eculizumab, or an antigen-binding fragment thereof, and once every three months thereafter. In one embodiment, the dsRNA agent is administered to the subject at a 400 mg fixed dose of the dsRNA agent once every weeks for twelve weeks, e.g., prior to administration of the dose of about 900 mg of eculizumab, or an antigen-binding fragment thereof, and once every six months thereafter. In one embodiment, the dsRNA agent is chronically administered to the subject at a 400 mg fixed dose of the dsRNA agent once every week.

[0060] In another aspect, the present invention provides methods for treating, e.g., chronically treating, a subject having paroxysmal nocturnal hemoglobinuria (PNH). The methods include administering to a subject having PNH and that has not responded to treatment with eculizumab, a 400 mg fixed dose of a double stranded ribonucleic acid (dsRNA) agent for inhibiting expression of complement component C5 once every month; and administering to the subject, a dose of about 300 mg to about 900 mg of eculizumab, or an antigen-binding fragment thereof, once every four weeks, wherein the dsRNA agent comprises a sense strand and an antisense strand, and wherein the sense strand comprises 5′-asasGfcAfaGfaUfAfUfuUfuuAfuAfaua-3′ (SEQ ID NO:2876) and the antisense strand comprises 5′-usAfsUfuAfuaAfaAfauaUfcUfuGfcuususudTdT-3′ (SEQ ID NO:2889), wherein a, g, c and u are 2′-O-methyl (2′-OMe) A, G, C, and U, respectively; Af, Gf, Cf and Uf are 2′-fluoro A, G, C and U, respectively; dT is a deoxy-thymine nucleotide; and s is a phosphorothioate linkage, thereby treating the subject. In one embodiment, the dsRNA agent is administered to the subject at a 400 mg fixed dose of the dsRNA agent once every month for two months, e.g., prior to the administration of the dose of about 300 mg to about 900 mg of eculizumab, or an antigen-binding fragment thereof, to the subject. In one embodiment, the dsRNA agent is administered to the subject at a 400 mg fixed dose of the dsRNA agent once every month for two months, e.g., prior to the administration of the dose of about 300 mg to about 900 mg of eculizumab, or an antigen-binding fragment thereof, to the subject, and once every three months thereafter. In one embodiment, the dsRNA agent is administered to the subject at a 400 mg fixed dose of the dsRNA agent once every month for two months, e.g., prior to the administration of the dose of about 300 mg to about 900 mg of eculizumab, or an antigen-binding fragment thereof, to the subject, and once every six months thereafter. In another embodiment, the dsRNA agent is administered to the subject at a 400 mg fixed dose of the dsRNA agent once every month for three months, e.g., prior to the administration of the dose of about 300 mg to about 900 mg of eculizumab, or an antigen-binding fragment thereof, to the subject. In one embodiment, the dsRNA agent is administered to the subject at a 400 mg fixed dose of the dsRNA agent once every month for three months, e.g., prior to the administration of the dose of about 300 mg to about 900 mg of eculizumab, or an antigen-binding fragment thereof, to the subject, and once every three months thereafter. In one embodiment, the dsRNA agent is administered to the subject at a 400 mg fixed dose of the dsRNA agent once every month for three months, e.g., prior to the administration of the dose of about 300 mg to about 900 mg of eculizumab, or an antigen-binding fragment thereof, to the subject, and once every six months thereafter. In one embodiment, the dsRNA agent is chronically administered to the subject at a 400 mg fixed dose of the dsRNA agent once every month. In another aspect, the present invention provides methods for treating, e.g., chronically treating, a subject having paroxysmal nocturnal hemoglobinuria (PNH). The methods include administering to a subject having PNH and that has not responded to treatment with eculizumab, a 400 mg fixed dose of a double stranded ribonucleic acid (dsRNA) agent for inhibiting expression of complement component C5 once every month; and administering to the subject, a dose of about 300 mg of eculizumab, or an antigen-binding fragment thereof, once every four weeks, wherein the dsRNA agent comprises a sense strand and an antisense strand, and wherein the sense strand comprises 5′-asasGfcAfaGfaUfAfUfuUfuuAfuAfaua-3′ (SEQ ID NO:2876) and the antisense strand comprises 5′-usAfsUfuAfuaAfaAfauaUfcUfuGfcuususudTdT-3′ (SEQ ID NO:2889), wherein a, g, c and u are 2′-O-methyl (2′-OMe) A, G, C, and U, respectively; Af, Gf, Cf and Uf are 2′-fluoro A, G, C and U, respectively; dT is a deoxy-thymine nucleotide; and s is a phosphorothioate linkage, thereby treating the subject. In one embodiment, the dsRNA agent is administered to the subject at a 400 mg fixed dose of the dsRNA agent once every month for two months, e.g., prior to the administration of the dose of about 300 mg of eculizumab, or an antigen-binding fragment thereof, to the subject. In one embodiment, the dsRNA agent is administered to the subject at a 400 mg fixed dose of the dsRNA agent once every month for two months, e.g., prior to the administration of the dose of about 300 mg of eculizumab, or an antigen-binding fragment thereof, to the subject, and once every three months thereafter. In one embodiment, the dsRNA agent is administered to the subject at a 400 mg fixed dose of the dsRNA agent once every month for two months, e.g., prior to the administration of the dose of about 300 mg of eculizumab, or an antigen-binding fragment thereof, to the subject, and once every six months thereafter. In another embodiment, the dsRNA agent is administered to the subject at a 400 mg fixed dose of the dsRNA agent once every month for three months, e.g., prior to the administration of the dose of about 300 mg of eculizumab, or an antigen-binding fragment thereof, to the subject. In one embodiment, the dsRNA agent is administered to the subject at a 400 mg fixed dose of the dsRNA agent once every month for three months, e.g., prior to the administration of the dose of about 300 mg of eculizumab, or an antigen-binding fragment thereof, to the subject, and once every three months thereafter. In one embodiment, the dsRNA agent is administered to the subject at a 400 mg fixed dose of the dsRNA agent once every month for three months, e.g., prior to the administration of the dose of about 300 mg of eculizumab, or an antigen-binding fragment thereof, to the subject, and once every six months thereafter. In one embodiment, the dsRNA agent is chronically administered to the subject at a 400 mg fixed dose of the dsRNA agent once every month.

[0061] In another aspect, the present invention provides methods for treating, e.g., chronically treating, a subject having paroxysmal nocturnal hemoglobinuria (PNH). The methods include administering to a subject having PNH and that has not responded to treatment with eculizumab, a 400 mg fixed dose of a double stranded ribonucleic acid (dsRNA) agent for inhibiting expression of complement component C5 once every month; and administering to the subject, a dose of about 600 mg of eculizumab, or an antigen-binding fragment thereof, once every four weeks, wherein the dsRNA agent comprises a sense strand and an antisense strand, and wherein the sense strand comprises 5′-asasGfcAfaGfaUfAfUfuUfuuAfuAfaua-3′ (SEQ ID NO:2876) and the antisense strand comprises 5′-usAfsUfuAfuaAfaAfauaUfcUfuGfcuususudTdT-3′ (SEQ ID NO:2889), wherein a, g, c and u are 2′-O-methyl (2′-OMe) A, G, C, and U, respectively; Af, Gf, Cf and Uf are 2′-fluoro A, G, C and U, respectively; dT is a deoxy-thymine nucleotide; and s is a phosphorothioate linkage, thereby treating the subject. In one embodiment, the dsRNA agent is administered to the subject at a 400 mg fixed dose of the dsRNA agent once every month for two months, e.g., prior to the administration of the dose of about 600 mg of eculizumab, or an antigen-binding fragment thereof, to the subject. In one embodiment, the dsRNA agent is administered to the subject at a 400 mg fixed dose of the dsRNA agent once every month for two months, e.g., prior to the administration of the dose of about 600 mg of eculizumab, or an antigen-binding fragment thereof, to the subject, and once every three months thereafter. In one embodiment, the dsRNA agent is administered to the subject at a 400 mg fixed dose of the dsRNA agent once every month for two months, e.g., prior to the administration of the dose of about 600 mg of eculizumab, or an antigen-binding fragment thereof, to the subject, and once every six months thereafter. In another embodiment, the dsRNA agent is administered to the subject at a 400 mg fixed dose of the dsRNA agent once every month for three months, e.g., prior to the administration of the dose of about 600 mg of eculizumab, or an antigen-binding fragment thereof, to the subject. In one embodiment, the dsRNA agent is administered to the subject at a 400 mg fixed dose of the dsRNA agent once every month for three months, e.g., prior to the administration of the dose of about 600 mg of eculizumab, or an antigen-binding fragment thereof, to the subject, and once every three months thereafter. In one embodiment, the dsRNA agent is administered to the subject at a 400 mg fixed dose of the dsRNA agent once every month for three months, e.g., prior to the administration of the dose of about 600 mg of eculizumab, or an antigen-binding fragment thereof, to the subject, and once every six months thereafter. In one embodiment, the dsRNA agent is chronically administered to the subject at a 400 mg fixed dose of the dsRNA agent once every month.

[0062] In another aspect, the present invention provides methods for treating, e.g., chronically treating, a subject having paroxysmal nocturnal hemoglobinuria (PNH). The methods include administering to a subject having PNH and that has not responded to treatment with eculizumab, a 400 mg fixed dose of a double stranded ribonucleic acid (dsRNA) agent for inhibiting expression of complement component C5 once every month; and administering to the subject, a dose of about 900 mg of eculizumab, or an antigen-binding fragment thereof, wherein the dsRNA agent comprises a sense strand and an antisense strand, and wherein the sense strand comprises 5′-asasGfcAfaGfaUfAfUfuUfuuAfuAfaua-3′ (SEQ ID NO:2876) and the antisense strand comprises 5′-usAfsUfuAfuaAfaAfauaUfcUfuGfcuususudTdT-3′ (SEQ ID NO:2889), wherein a, g, c and u are 2′-O-methyl (2′-OMe) A, G, C, and U, respectively; Af, Gf, Cf and Uf are 2′-fluoro A, G, C and U, respectively; dT is a deoxy-thymine nucleotide; and s is a phosphorothioate linkage, thereby treating the subject. In one embodiment, the dsRNA agent is administered to the subject at a 400 mg fixed dose of the dsRNA agent once every month for two months, e.g., prior to the administration of the dose of about 900 mg of eculizumab, or an antigen-binding fragment thereof, to the subject. In one embodiment, the dsRNA agent is administered to the subject at a 400 mg fixed dose of the dsRNA agent once every month for two months, e.g., prior to the administration of the dose of about 900 mg of eculizumab, or an antigen-binding fragment thereof, to the subject, and once every three months thereafter. In one embodiment, the dsRNA agent is administered to the subject at a 400 mg fixed dose of the dsRNA agent once every month for two months, e.g., prior to the administration of the dose of about 900 mg of eculizumab, or an antigen-binding fragment thereof, to the subject, and once every six months thereafter. In another embodiment, the dsRNA agent is administered to the subject at a 400 mg fixed dose of the dsRNA agent once every month for three months, e.g., prior to the administration of the dose of about 900 mg of eculizumab, or an antigen-binding fragment thereof, to the subject. In one embodiment, the dsRNA agent is administered to the subject at a 400 mg fixed dose of the dsRNA agent once every month for three months, e.g., prior to the administration of the dose of about 900 mg of eculizumab, or an antigen-binding fragment thereof, to the subject, and once every three months thereafter. In one embodiment, the dsRNA agent is administered to the subject at a 400 mg fixed dose of the dsRNA agent once every month for three months, e.g., prior to the administration of the dose of about 900 mg of eculizumab, or an antigen-binding fragment thereof, to the subject, and once every six months thereafter. In one embodiment, the dsRNA agent is chronically administered to the subject at a 400 mg fixed dose of the dsRNA agent once every month.

[0063] In some embodiments, the dose of eculizumab, or an antigen-binding fragment thereof, is about 10%, 15%, 20%, 25%, 30%, 35%, 40%, 45%, 50%, 55%, 60%, 65%, 70%, or 75% of the eculizumab maintenance label dose. In one embodiment, the dose of eculizumab, or an antigen-binding fragment thereof, is about 25%-75%, 25%-70%, 25%-65%, 25%-60%, 30%-75%, 30%-70%, 30%-65%, 30%-60%, 25%-50%, 25%-40% or 25%-30% of the eculizumab maintenance label dose.

[0064] In some embodiments, the frequency of administration of eculizumab is reduced as compared to the frequency of administration required by the label. In some aspects, eculizumab is administered once every four weeks, every 2 months, every 3 months, every 4 months, every 5 months or every 6 months.

[0065] In some embodiments, eculizumab, or an antigen-binding fragment thereof, is administered to the subject as a 300 mg fixed dose once a month. In some embodiments, eculizumab, or an antigen-binding fragment thereof, is administered to the subject as a 600 mg fixed dose once a month. In some embodiments, eculizumab, or an antigen-binding fragment thereof, is administered to the subject as a 900 mg fixed dose every other week. In other embodiments, the eculizumab, or an antigen-binding fragment thereof, is administered to the subject as a 1200 mg fixed dose for four weeks, followed by a 900 mg fixed dose every other week.

[0066] In some embodiments, the eculizumab, or an antigen-binding fragment thereof, is administered to the eculizumab naïve subject as a 300 mg fixed dose once every four weeks. In some embodiments, the eculizumab, or an antigen-binding fragment thereof, is administered to the eculizumab naïve subject as a 600 mg fixed dose once every four weeks. In other embodiments, the eculizumab, or an antigen-binding fragment thereof, is administered to the subject previously treated with eculizumab as a 900 mg fixed dose once every four weeks.

[0067] In one embodiment, the previous treatment of eculizumab or an antigen-binding fragment thereof, comprised administration to the subject of a 900 mg fixed dose of eculizumab twice weekly. In one embodiment, the eculizumab treatment that the subject did not respond to comprised administered to the subject of a 1200 mg fixed dose for four weeks.

[0068] In some aspects, the dsRNA agent and the eculizumab, or an antigen-binding fragment thereof, are administered to the subject simultaneously. In other aspects, the dsRNA agent is administered to the subject before the eculizumab, or an antigen-binding fragment thereof. In stll other aspects, the eculizumab, or an antigen-binding fragment thereof, is administered to the subject before the dsRNA agent.

[0069] In some embodiments, the treatment prevents breakthrough hemolysis in the subject.

[0070] In some embodiments, the treatment reduces the mean maximum C5 mRNA level by at least about 98% relative to baseline, e.g., at least about 99% relative to the baseline.

[0071] In some embodiments, the treatment lowers the minimum residual C5 level to about 1.0 micrograms/mL or below, e.g., about 0.9 micrograms/mL or below, 0.8 micrograms/mL or below, 0.7 micrograms/mL or below, 0.6 micrograms/mL or below, 0.5 micrograms/mL or below, 0.4 micrograms/mL or below, 0.3 micrograms/mL or below, 0.2 micrograms/mL or below or 0.1 micrograms/mL or below.

[0072] In some aspects, the treatment lowers the classical complement pathway (CCP) activity by at least about 94% relative to baseline, e.g., at least about 95%, at least about 96%, at least about 97%, at least about 98% or at least about 99% relative to baseline.

[0073] In some embodiments, the treatment lowers the alternative complement pathway (CAP) activity by at least about 94% relative to baseline, e.g., at least about 95%, at least about 96%, at least about 97%, at least about 98% or at least about 99% relative to baseline.

[0074] In certain aspects, the treatment inhibits the mean maximum hemolysis, as measured by inhibition of sheep red blood cell hemolysis, by at least about 75% relative to baseline, e.g., at least about 76%, at least about 77%, at least about 78%, at least about 79%, at least about 80%, at least about 81%, at least about 82%, at least about 83%, at least about 84%, at least about 85%, at least about 86%, at least about 87%, at least about 88%, at least about 89%, at least about 90%, at least about 91%, at least about 92%, at least about 93%, at least about 94%, at least about 95%, at least about 96%, at least about 97%, at least about 98% or at least about 99% relative to baseline.

[0075] In some embodiments, the treatment lowers the level of lactate dehydrogenase (LDH) in the subject to levels lower than about 1.5 times the upper limit of normal (ULN).

[0076] In some aspects, the subject previously treated with eculizumab did not have breakthrough hemolysis. In other aspects, the subject previously treated with eculizumab had breakthrough hemolysis.

[0077] In some embodiments, the treatment reduces the mean maximum C5 mRNA level by at least about 86% relative to baseline, e.g., at least about 87%, at least about 88%, at least about 89%, at least about 90%, at least about 91%, at least about 92%, at least about 93%, at least about 94%, at least about 95%, at least about 96%, at least about 97%, at least about 98% or at least about 99% relative to baseline.

[0078] In some aspects, the treatment lowers the minimum residual C5 level to about 8.0 micrograms/mL or below, e.g., about 7.5 micrograms/mL or below, about 7.0 micrograms/mL or below, about 6.5 micrograms/mL or below, about 6.0 micrograms/mL or below, about 5.5 micrograms/mL or below, about 5.0 micrograms/mL or below, about 4.5 micrograms/mL or below, about 4.0 micrograms/mL or below, about 3.5 micrograms/mL or below, about 3.0 micrograms/mL or below, about 2.5 micrograms/mL or below, about 2.0 micrograms/mL or below, about 1.5 micrograms/mL or below, about 1.0 micrograms/mL or below or about 0.5 micrograms/mL or below.

[0079] In some embodiments, the treatment lowers the classical complement pathway (CCP) activity by at least about 98% relative to baseline, e.g., at least about 99% relative to baseline.

[0080] In some aspects, the treatment lowers the alternative complement pathway (CAP) activity by at least about 98% relative to baseline, e.g., at least about 99% relative to baseline.

[0081] In certain embodiments, the treatment inhibits the mean maximum hemolysis, as measured by inhibition of sheep red blood cell hemolysis, by at least about 98% relative to baseline, e.g., at least about 99% relative to baseline.

[0082] In some embodiments, the level of lactate dehydrogenase (LDH) in the subject is reduced to about 215-225 IU/L.

[0083] In some aspects, the dsRNA agent is administered to the subject subcutaneously. In other aspects, the eculizumab is administered to the subject intravenously.

[0084] In some embodiments, the dsRNA agent further comprises a ligand. The ligand may be one or more GalNAc derivatives attached through a bivalent or trivalent branched linker. In a specific aspect, the ligand is

[chemical structure]

[0085] In further aspects, the ligand is attached to the 3′ end of the sense strand. In a specific embodiment, the RNAi agent is conjugated to the ligand as shown in the following schematic

[chemical structure]

[0086] In one aspect, the invention provides methods for treating, e.g., chronically treating, a subject having paroxysmal nocturnal hemoglobinuria (PNH). The methods include administering to an eculizumab naïve subject a 200 mg fixed dose of a double stranded ribonucleic acid (dsRNA) agent for inhibiting expression of complement component C5 once every week for thirteen weeks, followed by a 400 mg fixed dose of the dsRNA agent once every week wherein the dsRNA agent comprises a sense strand and an antisense strand, and wherein the sense strand comprises 5′-asasGfcAfaGfaUfAfUfuUfuuAfuAfaua-3′ (SEQ ID NO:2876) and the antisense strand comprises 5′-usAfsUfuAfuaAfaAfauaUfcUfuGfcuususudTdT-3′ (SEQ ID NO:2889), wherein a, g, c and u are 2′-O-methyl (2′-OMe) A, G, C, and U, respectively; Af, Gf, Cf and Uf are 2′-fluoro A, G, C and U, respectively; dT is a deoxy-thymine nucleotide; and s is a phosphorothioate linkage, thereby treating the subject.

### BRIEF DESCRIPTION OF THE DRAWINGS

[0087] FIG. 1 is a schematic of the three complement pathways: alternative, classical and lectin.

[0088] FIG. 2 is a graph showing the percentage of complement component C5 remaining in C57BL/6 mice following a single 10 mg/kg dose of the indicated iRNAs.

[0089] FIG. 3 is a graph showing the percentage of complement component C5 remaining in C57BL/6 mice following a single 10 mg/kg dose of the indicated iRNAs.

[0090] FIG. 4 is a graph showing the percentage of complement component C5 remaining in C57BL/6 mice 48 hours after a single 10 mg/kg dose of the indicated iRNAs.

[0091] FIG. 5A is a graph showing the percentage of hemolysis remaining at days 4 and 7 in rats after a single 2.5 mg/kg, 10 mg/kg, or 25 mg/kg subcutaneous dose of AD-58642.

[0092] FIG. 5B is a Western blot showing the amount of complement component C5 remaining at day 7 in rats after a single 2.5 mg/kg, 10 mg/kg, or 25 mg/kg subcutaneous dose of AD-58642.

[0093] FIGS. 6A and 6B are graphs showing the percentage of complement component C5 remaining in C57BL/6 mice 5 days after a single 1.25 mg/kg, 2.5 mg/kg, 5 mg/kg, 10 mg/kg or 25 mg/kg dose of AD-58642.

[0094] FIGS. 7A and 7B are graphs showing the percentage of hemolysis remaining at day 5 in C57BL/6 mice after a single 1.25 mg/kg, 2.5 mg/kg, 5 mg/kg, 10 mg/kg or 25 mg/kg dose of AD-58642.

[0095] FIG. 8 is a Western blot showing the amount of complement component C5 remaining at day 5 in C57BL/6 mice after a single 1.25 mg/kg, 2.5 mg/kg, 5 mg/kg, 10 mg/kg or 25 mg/kg dose of AD-58642.

[0096] FIG. 9 is a graph showing the amount of complement component C5 protein remaining at days 5 and 9 in mouse serum after a single 0.625 mg/kg, 1.25 mg/kg, 2.5 mg/kg, 5.0 mg/kg, or 10 mg/kg dose of AD-58641. The lower limit of quantitation (LLOQ) of the assay is shown as a dashed line.

[0097] FIG. 10 is a is a graph showing the amount of complement component C5 protein remaining at day 8 in mouse serum after a 0.625 mg/kg, 1.25 mg/kg, or 2.5 mg/kg dose of AD-58641 at days 0, 1, 2, and 3. The lower limit of quantitation (LLOQ) of the assay is shown as a dashed line.

[0098] FIGS. 11A and 11B depict the efficacy and cumulative effect of repeat administration of compound AD-58641 in rats. FIG. 11A is graph depicting the hemolytic activity remaining in the serum of rats on days 0, 4, 7, 11, 14, 18, 25, and 32 after repeat administration at 2.5 mg/kg/dose or 5.0 mg/kg/dose, q2w×3 (twice a week for 3 weeks). FIG. 11B is a Western blot showing the amount of complement component C5 protein remaining in the serum of the animals.

[0099] FIG. 12 is a graph showing the amount of complement component C5 protein in cynomolgus macaque serum at various time points before, during and after two rounds of subcutaneous dosing at 2.5 mg/kg or 5 mg/kg of AD-58641 every third day for eight doses. C5 protein levels were normalized to the average of the three pre-dose samples.

[0100] FIG. 13 is a graph showing the percentage of hemolysis remaining in cynomolgus macaque serum at various time points before, during and after two rounds of subcutaneous dosing at 2.5 mg/kg or 5 mg/kg of AD-58641 every third day for eight doses. Percent hemolysis was calculated relative to maximal hemolysis and to background hemolysis in control samples.

[0101] FIG. 14 is a graph showing the percentage of complement component C5 protein remaining at day 5 in the serum of C57BL/6 mice following a single 1 mg/kg dose of the indicated iRNAs.

[0102] FIG. 15 is a graph showing the percentage of complement component C5 protein remaining at day 5 in the serum of C57BL/6 mice following a single 0.25 mg/kg, 0.5 mg/kg, 1.0 mg/kg, or 2.0 mg/kg dose of the indicated iRNAs.

[0103] FIG. 16 is a graph showing the percentage of complement component C5 protein remaining in the serum of C57BL/6 mice at days 6, 13, 20, 27, and 34 following a single 1 mg/kg dose of the indicated iRNAs.

[0104] FIG. 17 is a graph showing the percentage of hemolysis remaining in rat serum at various time points following administration of a 5 mg/kg dose of the indicated compounds at days 0, 4, and 7.

[0105] FIG. 18A shows the nucleotide sequence of Homo sapiens Complement Component 5 (C5) (SEQ ID NO:1); FIG. 18B shows the nucleotide sequence of Macaca mulatta Complement Component 5 (C5) (SEQ ID NO:2); FIG. 18C shows the nucleotide sequence of Mus musculus Complement Component 5 (C5) (SEQ ID NO:3); FIG. 18D shows the nucleotide sequence of Rattus norvegicus Complement Component 5 (C5) (SEQ ID NO:4); FIG. 18E shows the reverse complement of SEQ ID NO: 1 (SEQ ID NO:5); FIG. 18F shows the reverse complement of SEQ ID NO:2 (SEQ ID NO:6); FIG. 18G shows the reverse complement of SEQ ID NO:3 (SEQ ID NO:7); and FIG. 18H shows the reverse complement of SEQ ID NO:4 (SEQ ID NO:8).

[0106] FIG. 19A is a graph showing the percentage of serum C5 levels in cynomolgus macaques treated with AD-62643 relative to pre-bleed levels. FIG. 19B is a graph showing the percentage of serum C5 levels in each individual cynomolgus macaque treated with AD-62643.

[0107] FIG. 20A is a graph showing the percentage of hemolysis in cynomolgus macaques treated with a QM regimen (5 mg/kg, qd×5, qw×8/10 mg/kg qm thereafter) of AD-62643 and FIG. 20B is a graph showing the percentage of hemolysis in cynomolgus macaques treated with a Q2W regimen (5 mg/kg, qw×8, q2w thereafter) of AD-62643. FIG. 20C is a graph showing the percentage of alternative complement pathway activity in cynomolgus macaques treated with AD-62643.

[0108] FIG. 21 is a graph showing serum levels of C5 protein in a mouse model of anti-collagen antibody-induced arthritis (CAIA) following treatment with AD-61679 and anti-C5 antibody.

[0109] FIG. 22A is a bar graph showing join histology scores in in CAIA mice following treatment with AD-61679 and anti-C5 antibody. FIG. 22B is a bar graph showing levels of C3 deposition in CAIA mice following treatment with AD-61679 and anti-C5 antibody.

[0110] FIG. 23A is a bar graph showing the percentage of hemolysis in a rat model of Passive Neymann Nephritis treated with anti-Fxla or with anti-Fxla and AD-61679. FIG. 23B is a bar graph showing the levels of urinary protein in a rat model of Passive Neymann Nephritis treated with anti-Fxla or with anti-Fxla and AD-61679.

[0111] FIG. 24 is a graph showing the mean C5 knockdown, relative to baseline, in healthy human subjects administered a single subcutaneous dose of 50 mg, 200 mg, 400 mg, 600 mg, or 900 mg of AD-62643.

[0112] FIG. 25 is a graph showing the mean knockdown of alternative complement pathway (CAP) activity, relative to baseline, in healthy human subjects administered a single subcutaneous dose of 50 mg, 200 mg, 400 mg, 600 mg, or 900 mg of AD-62643.

[0113] FIG. 26 is a graph showing the mean knockdown of classical complement pathway (CCP) activity, relative to baseline, in healthy human subjects administered a single subcutaneous dose of 50 mg, 200 mg, 400 mg, 600 mg, or 900 mg of AD-62643.

[0114] FIG. 27 is a graph showing the percentage of mean hemolysis reduction in healthy human subjects administered a single subcutaneous dose of 50 mg, 200 mg, 400 mg, 600 mg, or 900 mg of AD-62643.

[0115] FIG. 28A is a graph showing the correlation of the mean C5 knockdown in humans administered a single dose of AD-62643 versus non-human primates (NHP) administered a single dose of AD-62643.

[0116] FIG. 28B is a graph showing the percentage of mean C5 knockdown, relative to baseline, in healthy human subjects administered a single subcutaneous dose of AD-62643 and in non-human primates administered a single subcutaneous dose of AD-62643.

[0117] FIG. 29 is a graph showing the mean knockdown of classical complement pathway (CCP) activity, relative to baseline, in healthy human subjects administered a single subcutaneous dose of AD-62643.

[0118] FIG. 30A is a graph showing the percentage of mean hemolysis reduction in healthy human subjects administered a single subcutaneous dose of AD-62643.

[0119] FIG. 30B is a graph showing the mean hemolysis reduction in non-human primates administered a single subcutaneous dose of AD-62643.

[0120] FIG. 31 is a graph showing the mean C5 knockdown, relative to baseline, in healthy human subjects subcutaneously administered the indicated doses of AD-62643.

[0121] FIG. 32 is a graph showing the mean knockdown of alternative complement pathway (CAP) activity, relative to baseline, in healthy human subjects subcutaneously administered the indicated doses of AD-62643.

[0122] FIG. 33 is a graph showing the mean knockdown of classical complement pathway (CCP) activity, relative to baseline, in healthy human subjects subcutaneously administered the indicated doses of AD-62643.

[0123] FIG. 34 is a graph showing the percentage of mean hemolysis reduction in healthy human subjects subcutaneously administered the indicated doses of AD-62643.

[0124] FIGS. 35A and 35B depict an indirect graphical comparison of residual C5 levels in the serum of healthy human volunteers administered multiple doses of AD-62643 and the levels of free C5 in aHUS subjects aministered eculizumab. FIG. 35A is a graph depicting the levels of free C5 in aHUS subjects aministered eculizumab (ASCPT Annual Meeting, Atlanta, GA; Mar. 18-22, 2014; Abstract #387). FIG. 35B is a graph depicting the residual C5 levels in the serum of healthy human volunteers administered the indicated doses of AD-62643.

[0125] FIG. 36A is a graph showing the mean C5 knockdown, relative to baseline, in human eculizumab naïve subjects with PNH who were subcutaneously administered AD-62643.

[0126] FIG. 36B is a graph showing the mean C5 knockdown, relative to baseline, in human subjects with PNH receiving eculizumab who were subcutaneously administered AD-62643.

[0127] FIG. 37A is a graph showing the mean knockdown of classical complement pathway (CCP) activity, relative to baseline, in human eculizumab naïve subjects with PNH who were subcutaneously administered AD-62643.

[0128] FIG. 37B is a graph showing the mean knockdown of classical complement pathway (CCP) activity, relative to baseline, in human subjects with PNH receiving eculizumab who were also subcutaneously administered AD-62643.

[0129] FIG. 38A is a graph showing the percentage of mean hemolysis reduction in human eculizumab naïve subjects with PNH who were subcutaneously administered AD-62643.

[0130] FIG. 38B is a graph showing the percentage of mean hemolysis reduction in human subjects with PNH receiving eculizumab who were subcutaneously administered AD-62643.

[0131] FIG. 39 is a graph showing LDH levels in human eculizumab naïve subjects with PNH who were subcutaneously administered AD-62643.

[0132] FIG. 40 is a graph showing LDH level in a human subject with PNH who is an eculizumab inadequate responder.

[0133] FIG. 41 is a graph showing eculizumab plasma concentration before and after subcutaneous administration of AD-62643 to a subject with PNH receiving eculizumab.

[0134] FIG. 42 depicts the dosing schedule for the subjects in the extension of the Phase I/II Part C clinical trial of AD-62643 to investigate the effect of reduced eculizumab administration (dose and frequency) in the setting of ongoing AD-62643 pharmacology (i.e., in the absence of additional dosing of AD-62643) (referred to herein as the “Ecu sparing study”).

[0135] FIG. 43 is a graph showing the effect of eculizumab administration in the setting of ongoing AD-62643 phramacology on LDH levels in human eculizumab naïve subjects with PNH and human ecuulizumab background subjects with PNH.

[0136] FIG. 44A is a graph showing the effect of eculizumab administration in the setting of ongoing AD-62643 phramacology on percent classical complement pathway (CCP) activity in human eculizumab naïve subjects with PNH and human ecuulizumab background subjects with PNH.

[0137] FIG. 44B is a graph showing the effect of eculizumab administration in the setting of ongoing AD-62643 phramacology on percent sheep red blood cell (sRBC) hemolysis in himan eculizumab naïve subjects with PNH and human ecuulizumab background subjects with PNH.

[0138] FIG. 45 is a graph showing the effect of eculizumab administration in the setting of ongoing AD-62643 phramacology on eculizumab plasma concentration before and after subcutaneous administration eculizumab in human eculizumab naïve subjects with PNH and human ecuulizumab background subjects with PNH.

### DETAILED DESCRIPTION OF THE INVENTION

[0139] The present invention provides iRNA agents which effect the RNA-induced silencing complex (RISC)-mediated cleavage of RNA transcripts of a complement component C5 gene.

[0140] The iRNAs of the invention may include an RNA strand (the antisense strand) having a region which is about 30 nucleotides or less in length, e.g., 15-30, 15-29, 15-28, 15-27, 15-26, 15-25, 15-24, 15-23, 15-22, 15-21, 15-20, 15-19, 15-18, 15-17, 18-30, 18-29, 18-28, 18-27, 18-26, 18-25, 18-24, 18-23, 18-22, 18-21, 18-20, 19-30, 19-29, 19-28, 19-27, 19-26, 19-25, 19-24, 19-23, 19-22, 19-21, 19-20, 20-30, 20-29, 20-28, 20-27, 20-26, 20-25, 20-24,20-23, 20-22, 20-21, 21-30, 21-29, 21-28, 21-27, 21-26, 21-25, 21-24, 21-23, or 21-22 nucleotides in length, which region is substantially complementary to at least part of an mRNA transcript of a C5 gene.

[0141] In certain embodiments, the iRNAs of the invention include an RNA strand (the antisense strand) which can include longer lengths, for example up to 66 nucleotides, e.g., 36-66, 26-36, 25-36, 31-60, 22-43, 27-53 nucleotides in length with a region of at least 19 contiguous nucleotides that is substantially complementary to at least a part of an mRNA transcript of a complement component C5 gene. These iRNAs with the longer length antisense strands preferably include a second RNA strand (the sense strand) of 20-60 nucleotides in length wherein the sense and antisense strands form a duplex of 18-30 contiguous nucleotides.

[0142] The use of these iRNAs enables the targeted degradation of mRNAs of a C5 gene in mammals. Very low dosages of C5 iRNAs, in particular, can specifically and efficiently mediate RNA interference (RNAi), resulting in significant inhibition of expression of a C5 gene. The present inventors have demonstrated that iRNAs targeting C5 can mediate RNAi in vitro and in vivo, resulting in significant inhibition of expression of a C5 gene. Thus, methods and compositions including these iRNAs are useful for treating a subject who would benefit by a reduction in the levels and/or activity of a C5 protein, such as a subject having a complement component C5-associated disease, such as paroxysmal nocturnal hemoglobinuria (PNH).

[0143] The present invention also provides methods and combination therapies for treating a subject having a disorder that would benefit from inhibiting or reducing the expression of a C5 gene, e.g., a complement component C5-associated disease, such as paroxysmal nocturnal hemoglobinuria (PNH), atypical hemolytic uremic syndrome (aHUS), neuromyelitis optica (NMO), and myasthenia gravis, using iRNA compositions which effect the RNA-induced silencing complex (RISC)-mediated cleavage of RNA transcripts of a complement component C5 gene.

[0144] The present invention also provides methods for preventing at least one symptom, e.g., hemolysis, in a subject having a disorder that would benefit from inhibiting or reducing the expression of a C5 gene, e.g., a complement component C5-associated disease, such as paroxysmal nocturnal hemoglobinuria (PNH), atypical hemolytic uremic syndrome (aHUS), neuromyelitis optica (NMO), and myasthenia gravis. The present invention further provides iRNA compositions which effect the RNA-induced silencing complex (RISC)-mediated cleavage of RNA transcripts of a complement component C5 gene. The C5 gene may be within a cell, e.g., a cell within a subject, such as a human.

[0145] The combination therapies of the present invention include administering to a subject having a complement component C5-associated disease, an RNAi agent of the invention and an additional therapeutic, such as anti-complement component C5 antibody, or antigen-binding fragment thereof, e.g., eculizumab. The combination therapies of the invention reduce C5 levels in the subject (e.g., by about 30%, 35%, 40%, 45%, 50%, 55%, 60%, 65%, 70%, 75%, 80%, 85%, 90%, 95%, or about 99%) by targeting C5 mRNA with an iRNA agent of the invention and, accordingly, allow the therapeutically (or prophylactically) effective amount of eculizumab required to treat the subject to be reduced, thereby decreasing the costs of treatment and permitting easier and more convenient ways of administering eculizumab, such as subcutaneous administration.

[0146] The following detailed description discloses how to make and use compositions containing iRNAs to inhibit the expression of a C5 gene, as well as compositions, uses, and methods for treating subjects having diseases and disorders that would benefit from inhibition and/or reduction of the expression of this gene.

### I. Definitions

[0147] In order that the present invention may be more readily understood, certain terms are first defined. In addition, it should be noted that whenever a value or range of values of a parameter are recited, it is intended that values and ranges intermediate to the recited values are also intended to be part of this invention.

[0148] The articles “a” and “an” are used herein to refer to one or to more than one (i.e., to at least one) of the grammatical object of the article. By way of example, “an element” means one element or more than one element, e.g., a plurality of elements.

[0149] The term “including” is used herein to mean, and is used interchangeably with, the phrase “including but not limited to”.

[0150] The term “or” is used herein to mean, and is used interchangeably with, the term “and/or,” unless context clearly indicates otherwise.

[0151] As used herein, “complement component C5,” used interchangeably with the term “C5” refers to the well-known gene and polypeptide, also known in the art as CPAMD4, C3 and PZP-like alpha-2-macroglobulin domain-containing protein, anaphtlatoxin C5a analog, hemolytic complement (Hc), and complement C5. The sequence of a human C5 mRNA transcript can be found at, for example, GenBank Accession No. GI:38016946 (NM_001735.2; SEQ ID NO:1). The sequence of rhesus C5 mRNA can be found at, for example, GenBank Accession No. GI:297270262 (XM_001095750.2; SEQ ID NO:2). The sequence of mouse C5 mRNA can be found at, for example, GenBank Accession No. GI:291575171 (NM_010406.2; SEQ ID NO:3). The sequence of rat C5 mRNA can be found at, for example, GenBank Accession No. GI:392346248 (XM_345342.4; SEQ ID NO:4). Additional examples of C5 mRNA sequences are readily available using publicly available databases, e.g., GenBank.

[0152] The term“C5,” as used herein, also refers to naturally occurring DNA sequence variations of the C5 gene, such as a single nucleotide polymorphism in the C5 gene. Numerous SNPs within the C5 gene have been identified and may be found at, for example, NCBI dbSNP (see, e.g., ncbi.nlm.nih.gov/snp). Non-limiting examples of SNPs within the C5 gene may be found at, NCBI dbSNP Accession Nos. rs121909588 and rs121909587.

[0153] As used herein, “target sequence” refers to a contiguous portion of the nucleotide sequence of an mRNA molecule formed during the transcription of a C5 gene, including mRNA that is a product of RNA processing of a primary transcription product. In one embodiment, the target portion of the sequence will be at least long enough to serve as a substrate for iRNA-directed cleavage at or near that portion of the nucleotide sequence of an mRNA molecule formed during the transcription of a C5 gene.

[0154] The target sequence may be from about 9-36 nucleotides in length, e.g., about 15-30 nucleotides in length. For example, the target sequence can be from about 15-30 nucleotides, 15-29, 15-28, 15-27, 15-26, 15-25, 15-24, 15-23, 15-22, 15-21, 15-20, 15-19, 15-18, 15-17, 18-30, 18-29, 18-28, 18-27, 18-26, 18-25, 18-24, 18-23, 18-22, 18-21, 18-20, 19-30, 19-29, 19-28, 19-27, 19-26, 19-25, 19-24, 19-23, 19-22, 19-21, 19-20, 20-30, 20-29, 20-28, 20-27, 20-26, 20-25, 20-24,20-23, 20-22, 20-21, 21-30, 21-29, 21-28, 21-27, 21-26, 21-25, 21-24, 21-23, or 21-22 nucleotides in length. Ranges and lengths intermediate to the above recited ranges and lengths are also contemplated to be part of the invention.

[0155] As used herein, the term “strand comprising a sequence” refers to an oligonucleotide comprising a chain of nucleotides that is described by the sequence referred to using the standard nucleotide nomenclature.

[0156] “G,” “C,” “A,” “T” and “U” each generally stand for a nucleotide that contains guanine, cytosine, adenine, thymidine and uracil as a base, respectively. However, it will be understood that the term “ribonucleotide” or “nucleotide” can also refer to a modified nucleotide, as further detailed below, or a surrogate replacement moiety (see, e.g., Table 2). The skilled person is well aware that guanine, cytosine, adenine, and uracil can be replaced by other moieties without substantially altering the base pairing properties of an oligonucleotide comprising a nucleotide bearing such replacement moiety. For example, without limitation, a nucleotide comprising inosine as its base can base pair with nucleotides containing adenine, cytosine, or uracil. Hence, nucleotides containing uracil, guanine, or adenine can be replaced in the nucleotide sequences of dsRNA featured in the invention by a nucleotide containing, for example, inosine. In another example, adenine and cytosine anywhere in the oligonucleotide can be replaced with guanine and uracil, respectively to form G-U Wobble base pairing with the target mRNA. Sequences containing such replacement moieties are suitable for the compositions and methods featured in the invention.

[0157] The terms “IRNA”, “RNAi agent,” “iRNA agent,”, “RNA interference agent” as used interchangeably herein, refer to an agent that contains RNA as that term is defined herein, and which mediates the targeted cleavage of an RNA transcript via an RNA-induced silencing complex (RISC) pathway. iRNA directs the sequence-specific degradation of mRNA through a process known as RNA interference (RNAi). The iRNA modulates, e.g., inhibits, the expression of C5 in a cell, e.g., a cell within a subject, such as a mammalian subject.

[0158] In one embodiment, an RNAi agent of the invention includes a single stranded RNA that interacts with a target RNA sequence, e.g., a C5 target mRNA sequence, to direct the cleavage of the target RNA. Without wishing to be bound by theory it is believed that long double stranded RNA introduced into cells is broken down into siRNA by a Type III endonuclease known as Dicer (Sharp et al. (2001) Genes Dev. 15:485). Dicer, a ribonuclease-III-like enzyme, processes the dsRNA into 19-23 base pair short interfering RNAs with characteristic two base 3′ overhangs (Bernstein, et al., (2001) Nature 409:363). The siRNAs are then incorporated into an RNA-induced silencing complex (RISC) where one or more helicases unwind the siRNA duplex, enabling the complementary antisense strand to guide target recognition (Nykanen, et al., (2001) Cell 107:309). Upon binding to the appropriate target mRNA, one or more endonucleases within the RISC cleave the target to induce silencing (Elbashir, et al., (2001) Genes Dev. 15:188). Thus, in one aspect the invention relates to a single stranded RNA (siRNA) generated within a cell and which promotes the formation of a RISC complex to effect silencing of the target gene, i.e., a C5 gene. Accordingly, the term “siRNA” is also used herein to refer to an RNAi as described above.

[0159] In another embodiment, the RNAi agent may be a single-stranded siRNA that is introduced into a cell or organism to inhibit a target mRNA. Single-stranded RNAi agents bind to the RISC endonuclease, Argonaute 2, which then cleaves the target mRNA. The single-stranded siRNAs are generally 15-30 nucleotides and are chemically modified. The design and testing of single-stranded siRNAs are described in U.S. Pat. No. 8,101,348 and in Lima et al., (2012) Cell 150: 883-894, the entire contents of each of which are hereby incorporated herein by reference. Any of the antisense nucleotide sequences described herein may be used as a single-stranded siRNA as described herein or as chemically modified by the methods described in Lima et al., (2012) Cell 150: 883-894.

[0160] In another embodiment, an “iRNA” for use in the compositions, uses, and methods of the invention is a double stranded RNA and is referred to herein as a “double stranded RNAi agent,” “double stranded RNA (dsRNA) molecule,” “dsRNA agent,” or “dsRNA”. The term “dsRNA”, refers to a complex of ribonucleic acid molecules, having a duplex structure comprising two anti-parallel and substantially complementary nucleic acid strands, referred to as having “sense” and “antisense” orientations with respect to a target RNA, i.e., a C5 gene. In some embodiments of the invention, a double stranded RNA (dsRNA) triggers the degradation of a target RNA, e.g., an mRNA, through a post-transcriptional gene-silencing mechanism referred to herein as RNA interference or RNAi.

[0161] In general, the majority of nucleotides of each strand of a dsRNA molecule are ribonucleotides, but as described in detail herein, each or both strands can also include one or more non-ribonucleotides, e.g., a deoxyribonucleotide and/or a modified nucleotide. In addition, as used in this specification, an “RNAi agent” may include ribonucleotides with chemical modifications; an RNAi agent may include substantial modifications at multiple nucleotides. As used herein, the term “modified nucleotide” refers to a nucleotide having, independently, a modified sugar moiety, a modified internucleotide linkage, and/or a modified nucleobase. Thus, the term modified nucleotide encompasses substitutions, additions or removal of, e.g., a functional group or atom, to internucleoside linkages, sugar moieties, or nucleobases. The modifications suitable for use in the agents of the invention include all types of modifications disclosed herein or known in the art. Any such modifications, as used in a siRNA type molecule, are encompassed by “RNAi agent” for the purposes of this specification and claims. The duplex region may be of any length that permits specific degradation of a desired target RNA through a RISC pathway, and may range from about 9 to 36 base pairs in length, e.g., about 15-30 base pairs in length, for example, about 9, 10, 11, 12, 13, 14, 15, 16, 17, 18, 19, 20, 21, 22, 23, 24, 25, 26, 27, 28, 29, 30, 31, 32, 33, 34, 35, or 36 base pairs in length, such as about 15-30, 15-29, 15-28, 15-27, 15-26, 15-25, 15-24, 15-23, 15-22, 15-21, 15-20, 15-19, 15-18, 15-17, 18-30, 18-29, 18-28, 18-27, 18-26, 18-25, 18-24, 18-23, 18-22, 18-21, 18-20, 19-30, 19-29, 19-28, 19-27, 19-26, 19-25, 19-24, 19-23, 19-22, 19-21, 19-20, 20-30, 20-29, 20-28, 20-27, 20-26, 20-25, 20-24,20-23, 20-22, 20-21, 21-30, 21-29, 21-28, 21-27, 21-26, 21-25, 21-24, 21-23, or 21-22 base pairs in length. Ranges and lengths intermediate to the above recited ranges and lengths are also contemplated to be part of the invention.

[0162] The two strands forming the duplex structure may be different portions of one larger RNA molecule, or they may be separate RNA molecules. Where the two strands are part of one larger molecule, and therefore are connected by an uninterrupted chain of nucleotides between the 3′-end of one strand and the 5′-end of the respective other strand forming the duplex structure, the connecting RNA chain is referred to as a “hairpin loop.” A hairpin loop can comprise at least one unpaired nucleotide. In some embodiments, the hairpin loop can comprise at least 2, at least 3, at least 4, at least 5, at least 6, at least 7, at least 8, at least 9, at least 10, at least 20, at least 23 or more unpaired nucleotides.

[0163] Where the two substantially complementary strands of a dsRNA are comprised by separate RNA molecules, those molecules need not, but can be covalently connected. Where the two strands are connected covalently by means other than an uninterrupted chain of nucleotides between the 3′-end of one strand and the 5′-end of the respective other strand forming the duplex structure, the connecting structure is referred to as a “linker.” The RNA strands may have the same or a different number of nucleotides. The maximum number of base pairs is the number of nucleotides in the shortest strand of the dsRNA minus any overhangs that are present in the duplex. In addition to the duplex structure, an RNAi may comprise one or more nucleotide overhangs.

[0164] In one embodiment, an RNAi agent of the invention is a dsRNA of 24-30 nucleotides that interacts with a target RNA sequence, e.g., a C5 target mRNA sequence, to direct the cleavage of the target RNA. Without wishing to be bound by theory, long double stranded RNA introduced into cells is broken down into siRNA by a Type III endonuclease known as Dicer (Sharp et al. (2001) Genes Dev. 15:485). Dicer, a ribonuclease-III-like enzyme, processes the dsRNA into 19-23 base pair short interfering RNAs with characteristic two base 3′ overhangs (Bernstein, et al., (2001) Nature 409:363). The siRNAs are then incorporated into an RNA-induced silencing complex (RISC) where one or more helicases unwind the siRNA duplex, enabling the complementary antisense strand to guide target recognition (Nykanen, et al., (2001) Cell 107:309). Upon binding to the appropriate target mRNA, one or more endonucleases within the RISC cleave the target to induce silencing (Elbashir, et al., (2001) Genes Dev. 15:188).

[0165] As used herein, the term “nucleotide overhang” refers to at least one unpaired nucleotide that protrudes from the duplex structure of an iRNA, e.g., a dsRNA. For example, when a 3′-end of one strand of a dsRNA extends beyond the 5′-end of the other strand, or vice versa, there is a nucleotide overhang. A dsRNA can comprise an overhang of at least one nucleotide; alternatively the overhang can comprise at least two nucleotides, at least three nucleotides, at least four nucleotides, at least five nucleotides or more. A nucleotide overhang can comprise or consist of a nucleotide/nucleoside analog, including a deoxynucleotide/nucleoside. The overhang(s) can be on the sense strand, the antisense strand or any combination thereof. Furthermore, the nucleotide(s) of an overhang can be present on the 5′-end, 3′-end or both ends of either an antisense or sense strand of a dsRNA.

[0166] In one embodiment, the antisense strand of a dsRNA has a 1-10 nucleotide, e.g., a 1, 2, 3, 4, 5, 6, 7, 8, 9, or 10 nucleotide, overhang at the 3′-end and/or the 5′-end. In one embodiment, the sense strand of a dsRNA has a 1-10 nucleotide, e.g., a 1, 2, 3, 4, 5, 6, 7, 8, 9, or 10 nucleotide, overhang at the 3′-end and/or the 5′-end. In another embodiment, one or more of the nucleotides in the overhang is replaced with a nucleoside thiophosphate.

[0167] In certain embodiments, the overhang on the sense strand or the antisense strand, or both, can include extended lengths longer than 10 nucleotides, e.g., 1-30 nucleotides, 2-30 nucleotides, 10-30 nucleotides, or 10-15 nucleotides in length. In certain embodiments, an extended overhang is on the sense strand of the duplex. In certain embodiments, an extended overhang is present on the 3′ end of the sense strand of the duplex. In certain embodiments, an extended overhang is present on the 5′ end of the sense strand of the duplex. In certain embodiments, an extended overhang is on the antisense strand of the duplex. In certain embodiments, an extended overhang is present on the 3′ end of the antisense strand of the duplex. In certain embodiments, an extended overhang is present on the 5′ end of the antisense strand of the duplex. In certain embodiments, one or more of the nucleotides in the overhang is replaced with a nucleoside thiophosphate. In certain embodiments, the overhang includes a self-complementary portion such that the overhang is capable of forming a hairpin structure that is stable under physiological conditions.

[0168] “Blunt” or “blunt end” means that there are no unpaired nucleotides at that end of the double stranded RNAi agent, i.e., no nucleotide overhang. A “blunt ended” RNAi agent is a dsRNA that is double stranded over its entire length, i.e., no nucleotide overhang at either end of the molecule. The RNAi agents of the invention include RNAi agents with nucleotide overhangs at one end (i.e., agents with one overhang and one blunt end) or with nucleotide overhangs at both ends.

[0169] The term “antisense strand” or “guide strand” refers to the strand of an iRNA, e.g., a dsRNA, which includes a region that is substantially complementary to a target sequence, e.g., a C5 mRNA. As used herein, the term “region of complementarity” refers to the region on the antisense strand that is substantially complementary to a sequence, for example a target sequence, e.g., a C5 nucleotide sequence, as defined herein. Where the region of complementarity is not fully complementary to the target sequence, the mismatches can be in the internal or terminal regions of the molecule. Generally, the most tolerated mismatches are in the terminal regions, e.g., within 5, 4, 3, or 2 nucleotides of the 5′- and/or 3′-terminus of the iRNA.

[0170] The term “sense strand,” or “passenger strand” as used herein, refers to the strand of an iRNA that includes a region that is substantially complementary to a region of the antisense strand as that term is defined herein.

[0171] As used herein, the term “cleavage region” refers to a region that is located immediately adjacent to the cleavage site. The cleavage site is the site on the target at which cleavage occurs. In some embodiments, the cleavage region comprises three bases on either end of, and immediately adjacent to, the cleavage site. In some embodiments, the cleavage region comprises two bases on either end of, and immediately adjacent to, the cleavage site. In some embodiments, the cleavage site specifically occurs at the site bound by nucleotides 10 and 11 of the antisense strand, and the cleavage region comprises nucleotides 11, 12 and 13.

[0172] As used herein, and unless otherwise indicated, the term “complementary,” when used to describe a first nucleotide sequence in relation to a second nucleotide sequence, refers to the ability of an oligonucleotide or polynucleotide comprising the first nucleotide sequence to hybridize and form a duplex structure under certain conditions with an oligonucleotide or polynucleotide comprising the second nucleotide sequence, as will be understood by the skilled person. Such conditions can, for example, be stringent conditions, where stringent conditions can include: 400 mM NaCl, 40 mM PIPES pH 6.4, 1 mM EDTA, 50° C. or 70° C. for 12-16 hours followed by washing (see, e.g., “Molecular Cloning: A Laboratory Manual, Sambrook, et al. (1989) Cold Spring Harbor Laboratory Press). Other conditions, such as physiologically relevant conditions as can be encountered inside an organism, can apply. The skilled person will be able to determine the set of conditions most appropriate for a test of complementarity of two sequences in accordance with the ultimate application of the hybridized nucleotides.

[0173] Complementary sequences within an iRNA, e.g., within a dsRNA as described herein, include base-pairing of the oligonucleotide or polynucleotide comprising a first nucleotide sequence to an oligonucleotide or polynucleotide comprising a second nucleotide sequence over the entire length of one or both nucleotide sequences. Such sequences can be referred to as “fully complementary” with respect to each other herein. However, where a first sequence is referred to as “substantially complementary” with respect to a second sequence herein, the two sequences can be fully complementary, or they can form one or more, but generally not more than 5, 4, 3 or 2 mismatched base pairs upon hybridization for a duplex up to 30 base pairs, while retaining the ability to hybridize under the conditions most relevant to their ultimate application, e.g., inhibition of gene expression via a RISC pathway. However, where two oligonucleotides are designed to form, upon hybridization, one or more single stranded overhangs, such overhangs shall not be regarded as mismatches with regard to the determination of complementarity. For example, a dsRNA comprising one oligonucleotide 21 nucleotides in length and another oligonucleotide 23 nucleotides in length, wherein the longer oligonucleotide comprises a sequence of 21 nucleotides that is fully complementary to the shorter oligonucleotide, can yet be referred to as “fully complementary” for the purposes described herein.

[0174] “Complementary” sequences, as used herein, can also include, or be formed entirely from, non-Watson-Crick base pairs and/or base pairs formed from non-natural and modified nucleotides, in so far as the above requirements with respect to their ability to hybridize are fulfilled. Such non-Watson-Crick base pairs include, but are not limited to, G:U Wobble or Hoogstein base pairing.

[0175] The terms “complementary,” “fully complementary” and “substantially complementary” herein can be used with respect to the base matching between the sense strand and the antisense strand of a dsRNA, or between the antisense strand of an iRNA agent and a target sequence, as will be understood from the context of their use.

[0176] As used herein, a polynucleotide that is “substantially complementary to at least part of” a messenger RNA (mRNA) refers to a polynucleotide that is substantially complementary to a contiguous portion of the mRNA of interest (e.g., an mRNA encoding C5). For example, a polynucleotide is complementary to at least a part of a C5 mRNA if the sequence is substantially complementary to a non-interrupted portion of an mRNA encoding C5.

[0177] Accordingly, in some embodiments, the sense strand polynucleotides and the antisense polynucleotides disclosed herein are fully complementary to a complement component C5 gene sequence.

[0178] In one embodiment, the antisense polynucleotides disclosed herein are fully complementary to the target complement component C5 sequence. In other embodiments, the antisense polynucleotides disclosed herein are substantially complementary to the target complement component C5 sequence and comprise a contiguous nucleotide sequence which is at least about 80% complementary over its entire length to the equivalent region of the nucleotide sequence of SEQ ID NO: 1, or a fragment of SEQ ID NO: 1, such as about 85%, about 86%, about 87%, about 88%, about 89%, about 90%, about %91%, about 92%, about 93%, about 94%, about 95%, about 96%, about 97%, about 98%, or about 99% complementary.

[0179] In other embodiments, the antisense polynucleotides disclosed herein are substantially complementary to the target complement component C5 sequence and comprise a contiguous nucleotide sequence which is at least about 80% complementary over its entire length to any one of the sense strand nucleotide sequences in any one of Tables 3, 4, 5, 6, 18, 19, 20, 21, and 23, or a fragment of any one of the antisense strand nucleotide sequences in any one of Tables 3, 4, 5, 6, 18, 19, 20, 21, and 23, such as about 85%, about 86%, about 87%, about 88%, about 89%, about 90%, about %91%, about 92%, about 93%, about 94%, about 95%, about 96%, about 97%, about 98%, or about 99% complementary.

[0180] In one embodiment, an RNAi agent of the invention includes a sense strand that is substantially complementary to an antisense polynucleotide which, in turn, is complementary to a target complement component C5 sequence and comprises a contiguous nucleotide sequence which is at least about 80% complementary over its entire length to any one of the antisense strand nucleotide sequences in any one of Tables 3, 4, 5, 6, 18, 19, 20, 21, and 23, or a fragment of any one of the antisense strand nucleotide sequences in any one of Tables 3, 4, 5, 6, 18, 19, 20, 21, and 23, such as about 85%, about 86%, about 87%, about 88%, about 89%, about 90%, about %91%, about 92%, about 93%, about 94%, about 95%, about 96%, about 97%, about 98%, or about 99% complementary.

[0181] In general, the majority of nucleotides of each strand are ribonucleotides, but as described in detail herein, each or both strands can also include one or more non-ribonucleotides, e.g., a deoxyribonucleotide and/or a modified nucleotide. In addition, an “iRNA” may include ribonucleotides with chemical modifications. Such modifications may include all types of modifications disclosed herein or known in the art. Any such modifications, as used in an iRNA molecule, are encompassed by “iRNA” for the purposes of this specification and claims.

[0182] In one aspect of the invention, an agent for use in the methods and compositions of the invention is a single-stranded antisense RNA molecule that inhibits a target mRNA via an antisense inhibition mechanism. The single-stranded antisense RNA molecule is complementary to a sequence within the target mRNA. The single-stranded antisense oligonucleotides can inhibit translation in a stoichiometric manner by base pairing to the mRNA and physically obstructing the translation machinery, see Dias, N. et al., (2002) Mol Cancer Ther 1:347-355. The single-stranded antisense RNA molecule may be about 15 to about 30 nucleotides in length and have a sequence that is complementary to a target sequence. For example, the single-stranded antisense RNA molecule may comprise a sequence that is at least about 15, 16, 17, 18, 19, 20, or more contiguous nucleotides from any one of the antisense sequences described herein.

[0183] The term “lipid nanoparticle” or “LNP” is a vesicle comprising a lipid layer encapsulating a pharmaceutically active molecule, such as a nucleic acid molecule, e.g., an iRNA or a plasmid from which an iRNA is transcribed. LNPs are described in, for example, U.S. Pat. Nos. 6,858,225, 6,815,432, 8,158,601, and 8,058,069, the entire contents of which are hereby incorporated herein by reference.

[0184] As used herein, a “subject” is an animal, such as a mammal, including a primate (such as a human, a non-human primate, e.g., a monkey, and a chimpanzee), a non-primate (such as a cow, a pig, a camel, a llama, a horse, a goat, a rabbit, a sheep, a hamster, a guinea pig, a cat, a dog, a rat, a mouse, a horse, and a whale), or a bird (e.g., a duck or a goose). In an embodiment, the subject is a human, such as a human being treated or assessed for a disease, disorder or condition that would benefit from reduction in C5 expression; a human at risk for a disease, disorder or condition that would benefit from reduction in C5 expression; a human having a disease, disorder or condition that would benefit from reduction in C5 expression; and/or human being treated for a disease, disorder or condition that would benefit from reduction in C5 expression as described herein.

[0185] As used herein, the terms “treating” or “treatment” refer to a beneficial or desired result including, but not limited to, alleviation or amelioration of one or more symptoms associated with unwanted complement pathway activation (e.g., hemolysis and/or chronic inflammation); diminishing the extent of unwanted complement pathway activation; stabilization (i.e., not worsening) of the state of chronic inflammation and/or hemolysis; amelioration or palliation of unwanted complement pathway activation (e.g., chronic inflammation and/or hemolysis) whether detectable or undetectable. “Treatment” can also mean prolonging survival as compared to expected survival in the absence of treatment.

[0186] The term “lower” in the context of the level of a complement component C5 in a subject or a disease marker or symptom refers to a statistically significant decrease in such level. The decrease can be, for example, at least 10%, at least 15%, at least 20%, at least 25%, at least 30%, at least 35%, at least 40%, at least 45%, at least 50%, at least 55%, at least 60%, at least 65%, at least 70%, at least 75%, at least 80%, at least 85%, at least 90%, at least 95%, or more and is preferably down to a level accepted as within the range of normal for an individual without such disorder.

[0187] As used herein, “prevention” or “preventing,” when used in reference to a disease, disorder or condition thereof, that would benefit from a reduction in expression of a C5 gene, refers to a reduction in the likelihood that a subject will develop a symptom associated with such a disease, disorder, or condition, or a reduction in the frequency and/or duration of a symptom associated with such a disease, disorder, or condition, e.g., a symptom of unwanted complement activation, such as a chronic inflammation, hemolysis and/or thrombosis. The likelihood of developing a thrombosis is reduced, for example, when an individual having one or more risk factors for a thrombosis either fails to develop a thrombosis or develops a thrombosis with less severity relative to a population having the same risk factors and not receiving treatment as described herein. The failure to develop a disease, disorder or condition, or the reduction in the development of a symptom associated with such a disease, disorder or condition (e.g., by at least about 10% on a clinically accepted scale for that disease or disorder), or the exhibition of delayed symptoms delayed (e.g., by days, weeks, months or years) is considered effective prevention.

[0188] As used herein, the term “complement component C5-associated disease” is a disease or disorder that is caused by, or associated with complement activation. Such diseases are typically associated with inflammation and/or immune system activation, e.g., membrane attack complex-mediated lysis, anaphylaxis, and/or hemolysis. Non-limiting examples of complement component C5-associated diseases include paroxysmal nocturnal hemoglobinuria (PNH), atypical hemolytic uremic syndrome (aHUS), asthma, rheumatoid arthritis (RA); antiphospholipid antibody syndrome; lupus nephritis; ischemia-reperfusion injury; typical or infectious hemolytic uremic syndrome (tHUS); dense deposit disease (DDD); neuromyelitis optica (NMO); multifocal motor neuropathy (MMN); multiple sclerosis (MS); macular degeneration (e.g., age-related macular degeneration (AMD)); hemolysis, elevated liver enzymes, and low platelets (HELLP) syndrome; thrombotic thrombocytopenia purpura (TTP); spontaneous fetal loss; Pauci-immune vasculitis; epidermolysis bullosa; recurrent fetal loss; pre-eclampsia, traumatic brain injury, myasthenia gravis, cold agglutinin disease, dermatomyositis bullous pemphigoid, Shiga toxin E. coli-related hemolytic uremic syndrome, C3 nephropathy, anti-neutrophil cytoplasmic antibody-associated vasculitis (e.g., granulomatosis with polyangiitis (previously known as Wegener granulomatosis), Churg-Strauss syndrome, and microscopic polyangiitis), humoral and vascular transplant rejection, graft dysfunction, myocardial infarction (e.g., tissue damage and ischemia in myocardial infarction), an allogenic transplant, sepsis (e.g., poor outcome in sepsis), Coronary artery disease, dermatomyositis, Graves' disease, atherosclerosis, Alzheimer's disease, systemic inflammatory response sepsis, septic shock, spinal cord injury, glomerulonephritis, Hashimoto's thyroiditis, type I diabetes, psoriasis, pemphigus, autoimmune hemolytic anemia (AIHA), ITP, Goodpasture syndrome, Degos disease, antiphospholipid syndrome (APS), catastrophic APS (CAPS), a cardiovascular disorder, myocarditis, a cerebrovascular disorder, a peripheral (e.g., musculoskeletal) vascular disorder, a renovascular disorder, a mesenteric/enteric vascular disorder, vasculitis, Henoch-Schönlein purpura nephritis, systemic lupus erythematosus-associated vasculitis, vasculitis associated with rheumatoid arthritis, immune complex vasculitis, Takayasu's disease, dilated cardiomyopathy, diabetic angiopathy, Kawasaki's disease (arteritis), venous gas embolus (VGE), and restenosis following stent placement, rotational atherectomy, membraneous nephropathy, Guillain-Barre syndrome, and percutaneous transluminal coronary angioplasty (PTCA) (see, e.g., Holers (2008) Immunological Reviews 223:300-316; Holers and Thurman (2004) Molecular Immunology 41:147-152; U.S. Patent Publication No. 20070172483).

[0189] In one embodiment, a complement component C5-associated disease is paroxysmal nocturnal hemoglobinuria (PNH). The PNH may be classical PNH or PNH in the setting of another bone marrow failure syndrome and/or myelodysplastic syndromes (MDS), e.g., cytopenias. In another embodiment, a complement component C5-associated disease is atypical hemolytic uremic syndrome (aHUS). In another embodiment, a complement component C5-associated disease is neuromyelitis optica (NMO). In yet another embodiment, a complement component C5-associated disease is myasthenia gravis.

II. iRNAs of the Invention

[0190] The present invention provides iRNAs which inhibit the expression of a complement component C5 gene. In one embodiment, the iRNA agent includes double stranded ribonucleic acid (dsRNA) molecules for inhibiting the expression of a C5 gene in a cell, such as a cell within a subject, e.g., a mammal, such as a human having a complement component C5-associated disease, e.g., PNH. The dsRNA includes an antisense strand having a region of complementarity which is complementary to at least a part of an mRNA formed in the expression of a C5 gene. The region of complementarity is about 30 nucleotides or less in length (e.g., about 30, 29, 28, 27, 26, 25, 24, 23, 22, 21, 20, 19, or 18 nucleotides or less in length). Upon contact with a cell expressing the C5 gene, the iRNA inhibits the expression of the C5 gene (e.g., a human, a primate, a non-primate, or a bird C5 gene) by at least about 10% as assayed by, for example, a PCR or branched DNA (bDNA)-based method, or by a protein-based method, such as by immunofluorescence analysis, using, for example, Western Blotting or flowcytometric techniques.

[0191] A dsRNA includes two RNA strands that are complementary and hybridize to form a duplex structure under conditions in which the dsRNA will be used. One strand of a dsRNA (the antisense strand) includes a region of complementarity that is substantially complementary, and generally fully complementary, to a target sequence. The target sequence can be derived from the sequence of an mRNA formed during the expression of a C5 gene. The other strand (the sense strand) includes a region that is complementary to the antisense strand, such that the two strands hybridize and form a duplex structure when combined under suitable conditions. As described elsewhere herein and as known in the art, the complementary sequences of a dsRNA can also be contained as self-complementary regions of a single nucleic acid molecule, as opposed to being on separate oligonucleotides.

[0192] Generally, the duplex structure is about 15 to 30 base pairs in length, e.g., about 15-29, 15-28, 15-27, 15-26, 15-25, 15-24, 15-23, 15-22, 15-21, 15-20, 15-19, 15-18, 15-17, 18-30, 18-29, 18-28, 18-27, 18-26, 18-25, 18-24, 18-23, 18-22, 18-21, 18-20, 19-30, 19-29, 19-28, 19-27, 19-26, 19-25, 19-24, 19-23, 19-22, 19-21, 19-20, 20-30, 20-29, 20-28, 20-27, 20-26, 20-25, 20-24,20-23, 20-22, 20-21, 21-30, 21-29, 21-28, 21-27, 21-26, 21-25, 21-24, 21-23, or 21-22 base pairs in length. Ranges and lengths intermediate to the above recited ranges and lengths are also contemplated to be part of the invention.

[0193] Similarly, the region of complementarity to the target sequence is about 15 to 30 nucleotides in length, e.g., about 15-29, 15-28, 15-27, 15-26, 15-25, 15-24, 15-23, 15-22, 15-21, 15-20, 15-19, 15-18, 15-17, 18-30, 18-29, 18-28, 18-27, 18-26, 18-25, 18-24, 18-23, 18-22, 18-21, 18-20, 19-30, 19-29, 19-28, 19-27, 19-26, 19-25, 19-24, 19-23, 19-22, 19-21, 19-20, 20-30, 20-29, 20-28, 20-27, 20-26, 20-25, 20-24,20-23, 20-22, 20-21, 21-30, 21-29, 21-28, 21-27, 21-26, 21-25, 21-24, 21-23, or 21-22 nucleotides in length. Ranges and lengths intermediate to the above recited ranges and lengths are also contemplated to be part of the invention.

[0194] In some embodiments, the dsRNA is about 15 to about 20 nucleotides in length, or about 25 to about 30 nucleotides in length. In general, the dsRNA is long enough to serve as a substrate for the Dicer enzyme. For example, it is well-known in the art that dsRNAs longer than about 21-23 nucleotides in length may serve as substrates for Dicer. As the ordinarily skilled person will also recognize, the region of an RNA targeted for cleavage will most often be part of a larger RNA molecule, often an mRNA molecule. Where relevant, a “part” of an mRNA target is a contiguous sequence of an mRNA target of sufficient length to allow it to be a substrate for RNAi-directed cleavage (i.e., cleavage through a RISC pathway).

[0195] One of skill in the art will also recognize that the duplex region is a primary functional portion of a dsRNA, e.g., a duplex region of about 9 to 36 base pairs, e.g., about 10-36, 11-36, 12-36, 13-36, 14-36, 15-36, 9-35, 10-35, 11-35, 12-35, 13-35, 14-35, 15-35, 9-34, 10-34, 11-34, 12-34, 13-34, 14-34, 15-34, 9-33, 10-33, 11-33, 12-33, 13-33, 14-33, 15-33, 9-32, 10-32, 11-32, 12-32, 13-32, 14-32, 15-32, 9-31, 10-31, 11-31, 12-31, 13-32, 14-31, 15-31, 15-30, 15-29, 15-28, 15-27, 15-26, 15-25, 15-24, 15-23, 15-22, 15-21, 15-20, 15-19, 15-18, 15-17, 18-30, 18-29, 18-28, 18-27, 18-26, 18-25, 18-24, 18-23, 18-22, 18-21, 18-20, 19-30, 19-29, 19-28, 19-27, 19-26, 19-25, 19-24, 19-23, 19-22, 19-21, 19-20, 20-30, 20-29, 20-28, 20-27, 20-26, 20-25, 20-24, 20-23, 20-22, 20-21, 21-30, 21-29, 21-28, 21-27, 21-26, 21-25, 21-24, 21-23, or 21-22 base pairs. Thus, in one embodiment, to the extent that it becomes processed to a functional duplex, of e.g., 15-30 base pairs, that targets a desired RNA for cleavage, an RNA molecule or complex of RNA molecules having a duplex region greater than 30 base pairs is a dsRNA. Thus, an ordinarily skilled artisan will recognize that in one embodiment, a miRNA is a dsRNA. In another embodiment, a dsRNA is not a naturally occurring miRNA. In another embodiment, an iRNA agent useful to target C5 expression is not generated in the target cell by cleavage of a larger dsRNA.

[0196] A dsRNA as described herein can further include one or more single-stranded nucleotide overhangs e.g., 1, 2, 3, or 4 nucleotides. dsRNAs having at least one nucleotide overhang can have unexpectedly superior inhibitory properties relative to their blunt-ended counterparts. A nucleotide overhang can comprise or consist of a nucleotide/nucleoside analog, including a deoxynucleotide/nucleoside. The overhang(s) can be on the sense strand, the antisense strand or any combination thereof. Furthermore, the nucleotide(s) of an overhang can be present on the 5′-end, 3′-end or both ends of either an antisense or sense strand of a dsRNA.

[0197] A dsRNA can be synthesized by standard methods known in the art as further discussed below, e.g., by use of an automated DNA synthesizer, such as are commercially available from, for example, Biosearch, Applied Biosystems, Inc.

[0198] iRNA compounds of the invention may be prepared using a two-step procedure. First, the individual strands of the double stranded RNA molecule are prepared separately. Then, the component strands are annealed. The individual strands of the siRNA compound can be prepared using solution-phase or solid-phase organic synthesis or both. Organic synthesis offers the advantage that the oligonucleotide strands comprising unnatural or modified nucleotides can be easily prepared. Single-stranded oligonucleotides of the invention can be prepared using solution-phase or solid-phase organic synthesis or both.

[0199] In one aspect, a dsRNA of the invention includes at least two nucleotide sequences, a sense sequence and an anti-sense sequence. The sense strand is selected from the group of sequences provided in any one of Tables 3, 4, 5, 6, 18, 19, 20, 21, and 23, and the corresponding antisense strand of the sense strand is selected from the group of sequences of any one of Tables 3, 4, 5, 6, 18, 19, 20, 21, and 23. In this aspect, one of the two sequences is complementary to the other of the two sequences, with one of the sequences being substantially complementary to a sequence of an mRNA generated in the expression of a C5 gene. As such, in this aspect, a dsRNA will include two oligonucleotides, where one oligonucleotide is described as the sense strand in any one of Tables 3, 4, 5, 6, 18, 19, 20, 21, and 23, and the second oligonucleotide is described as the corresponding antisense strand of the sense strand in any one of Tables 3, 4, 5, 6, 18, 19, 20, 21, and 23. In one embodiment, the substantially complementary sequences of the dsRNA are contained on separate oligonucleotides. In another embodiment, the substantially complementary sequences of the dsRNA are contained on a single oligonucleotide.

[0200] It will be understood that, although some of the sequences in Tables 3, 4, 5, 6, 18, 19, 20, 21, and 23 are described as modified and/or conjugated sequences, the RNA of the iRNA of the invention e.g., a dsRNA of the invention, may comprise any one of the sequences set forth in Tables 3, 4, 5, 6, 18, 19, 20, 21, and 23 that is un-modified, un-conjugated, and/or modified and/or conjugated differently than described therein.

[0201] The skilled person is well aware that dsRNAs having a duplex structure of between about 20 and 23 base pairs, e.g., 21, base pairs have been hailed as particularly effective in inducing RNA interference (Elbashir et al., EMBO 2001, 20:6877-6888). However, others have found that shorter or longer RNA duplex structures can also be effective (Chu and Rana (2007) RNA 14:1714-1719; Kim et al. (2005) Nat Biotech 23:222-226). In the embodiments described above, by virtue of the nature of the oligonucleotide sequences provided in any one of Tables 3, 4, 5, 6, 18, 19, 20, 21, and 23, dsRNAs described herein can include at least one strand of a length of minimally 21 nucleotides. It can be reasonably expected that shorter duplexes having one of the sequences of any one of Tables 3, 4, 5, 6, 18, 19, 20, 21, and 23 minus only a few nucleotides on one or both ends can be similarly effective as compared to the dsRNAs described above. Hence, dsRNAs having a sequence of at least 15, 16, 17, 18, 19, 20, or more contiguous nucleotides derived from one of the sequences of any one of Tables 3, 4, 5, 6, 18, 19, 20, 21, and 23, and differing in their ability to inhibit the expression of a C5 gene by not more than about 5, 10, 15, 20, 25, or 30% inhibition from a dsRNA comprising the full sequence, are contemplated to be within the scope of the present invention.

[0202] In addition, the RNAs provided in any one of Tables 3, 4, 5, 6, 18, 19, 20, 21, and 23 identify a site(s) in a C5 transcript that is susceptible to RISC-mediated cleavage. As such, the present invention further features iRNAs that target within one of these sites. As used herein, an iRNA is said to target within a particular site of an RNA transcript if the iRNA promotes cleavage of the transcript anywhere within that particular site. Such an iRNA will generally include at least about 15 contiguous nucleotides from one of the sequences provided in any one of Tables 3, 4, 5, 6, 18, 19, 20, 21, and 23 coupled to additional nucleotide sequences taken from the region contiguous to the selected sequence in a C5 gene.

[0203] While a target sequence is generally about 15-30 nucleotides in length, there is wide variation in the suitability of particular sequences in this range for directing cleavage of any given target RNA. Various software packages and the guidelines set out herein provide guidance for the identification of optimal target sequences for any given gene target, but an empirical approach can also be taken in which a “window” or “mask” of a given size (as a non-limiting example, 21 nucleotides) is literally or figuratively (including, e.g., in silico) placed on the target RNA sequence to identify sequences in the size range that can serve as target sequences. By moving the sequence “window” progressively one nucleotide upstream or downstream of an initial target sequence location, the next potential target sequence can be identified, until the complete set of possible sequences is identified for any given target size selected. This process, coupled with systematic synthesis and testing of the identified sequences (using assays as described herein or as known in the art) to identify those sequences that perform optimally can identify those RNA sequences that, when targeted with an iRNA agent, mediate the best inhibition of target gene expression. Thus, while the sequences identified, for example, in any one of Tables 3, 4, 5, 6, 18, 19, 20, 21, and 23 represent effective target sequences, it is contemplated that further optimization of inhibition efficiency can be achieved by progressively “walking the window” one nucleotide upstream or downstream of the given sequences to identify sequences with equal or better inhibition characteristics.

[0204] Further, it is contemplated that for any sequence identified, e.g., in any one of Tables 3, 4, 5, 6, 18, 19, 20, 21, and 23, further optimization could be achieved by systematically either adding or removing nucleotides to generate longer or shorter sequences and testing those sequences generated by walking a window of the longer or shorter size up or down the target RNA from that point. Again, coupling this approach to generating new candidate targets with testing for effectiveness of iRNAs based on those target sequences in an inhibition assay as known in the art and/or as described herein can lead to further improvements in the efficiency of inhibition. Further still, such optimized sequences can be adjusted by, e.g., the introduction of modified nucleotides as described herein or as known in the art, addition or changes in overhang, or other modifications as known in the art and/or discussed herein to further optimize the molecule (e.g., increasing serum stability or circulating half-life, increasing thermal stability, enhancing transmembrane delivery, targeting to a particular location or cell type, increasing interaction with silencing pathway enzymes, increasing release from endosomes) as an expression inhibitor.

[0205] An iRNA as described herein can contain one or more mismatches to the target sequence. In one embodiment, an iRNA as described herein contains no more than 3 mismatches. If the antisense strand of the iRNA contains mismatches to a target sequence, it is preferable that the area of mismatch is not located in the center of the region of complementarity. If the antisense strand of the iRNA contains mismatches to the target sequence, it is preferable that the mismatch be restricted to be within the last 5 nucleotides from either the 5′- or 3′-end of the region of complementarity. For example, for a 23 nucleotide iRNA agent the strand which is complementary to a region of a C5 gene, generally does not contain any mismatch within the central 13 nucleotides. The methods described herein or methods known in the art can be used to determine whether an iRNA containing a mismatch to a target sequence is effective in inhibiting the expression of a C5 gene. Consideration of the efficacy of iRNAs with mismatches in inhibiting expression of a C5 gene is important, especially if the particular region of complementarity in a C5 gene is known to have polymorphic sequence variation within the population.

III. Modified iRNAs of the Invention

[0206] In one embodiment, the RNA of the iRNA of the invention e.g., a dsRNA, is un-modified, and does not comprise, e.g., chemical modifications and/or conjugations known in the art and described herein. In another embodiment, the RNA of an iRNA of the invention, e.g., a dsRNA, is chemically modified to enhance stability or other beneficial characteristics. In certain embodiments of the invention, substantially all of the nucleotides of an iRNA of the invention are modified. In other embodiments of the invention, all of the nucleotides of an iRNA of the invention are modified. iRNAs of the invention in which “substantially all of the nucleotides are modified” are largely but not wholly modified and can include not more than 5, 4, 3, 2, or 1 unmodified nucleotides.

[0207] The nucleic acids featured in the invention can be synthesized and/or modified by methods well established in the art, such as those described in “Current protocols in nucleic acid chemistry,” Beaucage, S. L. et al. (Edrs.), John Wiley & Sons, Inc., New York, NY, USA, which is hereby incorporated herein by reference. Modifications include, for example, end modifications, e.g., 5′-end modifications (phosphorylation, conjugation, inverted linkages) or 3′-end modifications (conjugation, DNA nucleotides, inverted linkages, etc.); base modifications, e.g., replacement with stabilizing bases, destabilizing bases, or bases that base pair with an expanded repertoire of partners, removal of bases (abasic nucleotides), or conjugated bases; sugar modifications (e.g., at the 2′-position or 4′-position) or replacement of the sugar; and/or backbone modifications, including modification or replacement of the phosphodiester linkages. Specific examples of iRNA compounds useful in the embodiments described herein include, but are not limited to RNAs containing modified backbones or no natural internucleoside linkages. RNAs having modified backbones include, among others, those that do not have a phosphorus atom in the backbone. For the purposes of this specification, and as sometimes referenced in the art, modified RNAs that do not have a phosphorus atom in their internucleoside backbone can also be considered to be oligonucleosides. In some embodiments, a modified iRNA will have a phosphorus atom in its internucleoside backbone.

[0208] Modified RNA backbones include, for example, phosphorothioates, chiral phosphorothioates, phosphorodithioates, phosphotriesters, aminoalkylphosphotriesters, methyl and other alkyl phosphonates including 3′-alkylene phosphonates and chiral phosphonates, phosphinates, phosphoramidates including 3′-amino phosphoramidate and aminoalkylphosphoramidates, thionophosphoramidates, thionoalkylphosphonates, thionoalkylphosphotriesters, and boranophosphates having normal 3′-5′ linkages, 2′-5′-linked analogs of these, and those having inverted polarity wherein the adjacent pairs of nucleoside units are linked 3′-5′ to 5′-3′ or 2′-5′ to 5′-2′. Various salts, mixed salts and free acid forms are also included.

[0209] Representative U.S. patents that teach the preparation of the above phosphorus-containing linkages include, but are not limited to, U.S. Pat. Nos. 3,687,808; 4,469,863; 4,476,301; 5,023,243; 5,177,195; 5,188,897; 5,264,423; 5,276,019; 5,278,302; 5,286,717; 5,321,131; 5,399,676; 5,405,939; 5,453,496; 5,455,233; 5,466,677; 5,476,925; 5,519,126; 5,536,821; 5,541,316; 5,550,111; 5,563,253; 5,571,799; 5,587,361; 5,625,050; 6,028,188; 6,124,445; 6,160,109; 6,169, 170; 6, 172,209; 6, 239,265; 6,277,603; 6,326,199; 6,346,614; 6,444,423; 6,531,590; 6,534,639; 6,608,035; 6,683, 167; 6,858,715; 6,867,294; 6,878,805; 7,015,315; 7,041,816; 7,273,933; 7,321,029; and U.S. Pat. RE39464, the entire contents of each of which are hereby incorporated herein by reference.

[0210] Modified RNA backbones that do not include a phosphorus atom therein have backbones that are formed by short chain alkyl or cycloalkyl internucleoside linkages, mixed heteroatoms and alkyl or cycloalkyl internucleoside linkages, or one or more short chain heteroatomic or heterocyclic internucleoside linkages. These include those having morpholino linkages (formed in part from the sugar portion of a nucleoside); siloxane backbones; sulfide, sulfoxide and sulfone backbones; formacetyl and thioformacetyl backbones; methylene formacetyl and thioformacetyl backbones; alkene containing backbones; sulfamate backbones; methyleneimino and methylenehydrazino backbones; sulfonate and sulfonamide backbones; amide backbones; and others having mixed N, O, S and CH₂ component parts.

[0211] Representative U.S. patents that teach the preparation of the above oligonucleosides include, but are not limited to, U.S. Pat. Nos. 5,034,506; 5,166,315; 5,185,444; 5,214,134; 5,216,141; 5,235,033; 5,64,562; 5,264,564; 5,405,938; 5,434,257; 5,466,677; 5,470,967; 5,489,677; 5,541,307; 5,561,225; 5,596,086; 5,602,240; 5,608,046; 5,610,289; 5,618,704; 5,623,070; 5,663,312; 5,633,360; 5,677,437; and, 5,677,439, the entire contents of each of which are hereby incorporated herein by reference.

[0212] In other embodiments, suitable RNA mimetics are contemplated for use in iRNAs, in which both the sugar and the internucleoside linkage, i.e., the backbone, of the nucleotide units are replaced with novel groups. The base units are maintained for hybridization with an appropriate nucleic acid target compound. One such oligomeric compound, an RNA mimetic that has been shown to have excellent hybridization properties, is referred to as a peptide nucleic acid (PNA). In PNA compounds, the sugar backbone of an RNA is replaced with an amide containing backbone, in particular an aminoethylglycine backbone. The nucleobases are retained and are bound directly or indirectly to aza nitrogen atoms of the amide portion of the backbone. Representative U.S. patents that teach the preparation of PNA compounds include, but are not limited to, U.S. Pat. Nos. 5,539,082; 5,714,331; and 5,719,262, the entire contents of each of which are hereby incorporated herein by reference. Additional PNA compounds suitable for use in the iRNAs of the invention are described in, for example, in Nielsen et al., Science, 1991, 254, 1497-1500.

[0213] Some embodiments featured in the invention include RNAs with phosphorothioate backbones and oligonucleosides with heteroatom backbones, and in particular—CH₂—NH—CH₂—, —CH₂—N(CH₃)—O—CH₂—[known as a methylene(methylimino) or MMI backbone], —CH₂—O—N(CH₃)—CH₂—, —CH₂—N(CH₃)—N(CH₃)—CH₂— and —N(CH₃)—CH₂—CH₂—[wherein the native phosphodiester backbone is represented as —O—P—O—CH₂—] of the above-referenced U.S. Pat. No. 5,489,677, and the amide backbones of the above-referenced U.S. Pat. No. 5,602,240. In some embodiments, the RNAs featured herein have morpholino backbone structures of the above-referenced U.S. Pat. No. 5,034,506.

[0214] Modified RNAs can also contain one or more substituted sugar moieties. The iRNAs, e.g., dsRNAs, featured herein can include one of the following at the 2′-position: OH; F; O—, S—, or N-alkyl; O—, S—, or N-alkenyl; O—, S- or N-alkynyl; or O-alkyl-O-alkyl, wherein the alkyl, alkenyl and alkynyl can be substituted or unsubstituted C₁ to C₁₀ alkyl or C₂ to C₁₀ alkenyl and alkynyl. Exemplary suitable modifications include O[(CH₂)ₙO]ₘCH₃, O(CH₂)_{.n}OCH₃, O(CH₂)ₙNH₂, O(CH₂)ₙCH₃, O(CH₂)ₙONH₂, and O(CH₂)ₙON[(CH₂)ₙCH₃)]₂, where n and m are from 1 to about 10. In other embodiments, dsRNAs include one of the following at the 2′ position: C₁ to C₁₀ lower alkyl, substituted lower alkyl, alkaryl, aralkyl, O-alkaryl or O-aralkyl, SH, SCH₃, OCN, Cl, Br, CN, CF₃, OCF₃, SOCH₃, SO₂CH₃, ONO₂, N₃, NH₂, heterocycloalkyl, heterocycloalkaryl, aminoalkylamino, polyalkylamino, substituted silyl, an RNA cleaving group, a reporter group, an intercalator, a group for improving the pharmacokinetic properties of an iRNA, or a group for improving the pharmacodynamic properties of an iRNA, and other substituents having similar properties. In some embodiments, the modification includes a 2′-methoxyethoxy (2′-O—CH₂CH₂OCH₃, also known as 2′-O-(2-methoxyethyl) or 2′-MOE) (Martin et al., Helv. Chim. Acta, 1995, 78:486-504) i.e., an alkoxy-alkoxy group. Another exemplary modification is 2′-dimethylaminooxyethoxy, i.e., a O(CH₂)₂ON(CH₃)₂ group, also known as 2′-DMAOE, as described in examples herein below, and 2′-dimethylaminoethoxyethoxy (also known in the art as 2′-O-dimethylaminoethoxyethyl or 2′-DMAEOE), i.e., 2′-O—CH₂—O—CH₂—N(CH₂)₂.

[0215] Other modifications include 2′-methoxy (2′-OCH₃), 2′-aminopropoxy (2′-OCH₂CH₂CH₂NH₂) and 2′-fluoro (2′-F). Similar modifications can also be made at other positions on the RNA of an iRNA, particularly the 3′ position of the sugar on the 3′ terminal nucleotide or in 2′-5′ linked dsRNAs and the 5′ position of 5′ terminal nucleotide. iRNAs can also have sugar mimetics such as cyclobutyl moieties in place of the pentofuranosyl sugar. Representative U.S. patents that teach the preparation of such modified sugar structures include, but are not limited to, U.S. Pat. Nos. 4,981,957; 5,118,800; 5,319,080; 5,359,044; 5,393,878; 5,446,137; 5,466,786; 5,514,785; 5,519,134; 5,567,811; 5,576,427; 5,591,722; 5,597,909; 5,610,300; 5,627,053; 5,639,873; 5,646,265; 5,658,873; 5,670,633; and 5,700,920, certain of which are commonly owned with the instant application. The entire contents of each of the foregoing are hereby incorporated herein by reference.

[0216] An iRNA can also include nucleobase (often referred to in the art simply as “base”) modifications or substitutions. As used herein, “unmodified” or “natural” nucleobases include the purine bases adenine (A) and guanine (G), and the pyrimidine bases thymine (T), cytosine (C) and uracil (U). Modified nucleobases include other synthetic and natural nucleobases such as deoxy-thymine (dT), 5-methylcytosine (5-me-C), 5-hydroxymethyl cytosine, xanthine, hypoxanthine, 2-aminoadenine, 6-methyl and other alkyl derivatives of adenine and guanine, 2-propyl and other alkyl derivatives of adenine and guanine, 2-thiouracil, 2-thiothymine and 2-thiocytosine, 5-halouracil and cytosine, 5-propynyl uracil and cytosine, 6-azo uracil, cytosine and thymine, 5-uracil (pseudouracil), 4-thiouracil, 8-halo, 8-amino, 8-thiol, 8-thioalkyl, 8-hydroxyl anal other 8-substituted adenines and guanines, 5-halo, particularly 5-bromo, 5-trifluoromethyl and other 5-substituted uracils and cytosines, 7-methylguanine and 7-methyladenine, 8-azaguanine and 8-azaadenine, 7-deazaguanine and 7-daazaadenine and 3-deazaguanine and 3-deazaadenine. Further nucleobases include those disclosed in U.S. Pat. No. 3,687,808, those disclosed in Modified Nucleosides in Biochemistry, Biotechnology and Medicine, Herdewijn, P. ed. Wiley-VCH, 2008; those disclosed in The Concise Encyclopedia Of Polymer Science And Engineering, pages 858-859, Kroschwitz, J. L, ed. John Wiley & Sons, 1990, these disclosed by Englisch et al., Angewandte Chemie, International Edition, 1991, 30, 613, and those disclosed by Sanghvi, Y S., Chapter 15, dsRNA Research and Applications, pages 289-302, Crooke, S. T. and Lebleu, B., Ed., CRC Press, 1993. Certain of these nucleobases are particularly useful for increasing the binding affinity of the oligomeric compounds featured in the invention. These include 5-substituted pyrimidines, 6-azapyrimidines and N-2, N-6 and 0-6 substituted purines, including 2-aminopropyladenine, 5-propynyluracil and 5-propynylcytosine. 5-methylcytosine substitutions have been shown to increase nucleic acid duplex stability by 0.6-1.2° C. (Sanghvi, Y. S., Crooke, S. T. and Lebleu, B., Eds., dsRNA Research and Applications, CRC Press, Boca Raton, 1993, pp. 276-278) and are exemplary base substitutions, even more particularly when combined with 2′-O-methoxyethyl sugar modifications.

[0217] Representative U.S. patents that teach the preparation of certain of the above noted modified nucleobases as well as other modified nucleobases include, but are not limited to, the above noted U.S. Pat. Nos. 3,687,808, 4,845,205; 5,130,30; 5,134,066; 5,175,273; 5,367,066; 5,432,272; 5,457,187; 5,459,255; 5,484,908; 5,502,177; 5,525,711; 5,552,540; 5,587,469; 5,594, 121, 5,596,091; 5,614,617; 5,681,941; 5,750,692; 6,015,886; 6, 147,200; 6,166,197;

[0218] 6,222,025; 6,235,887; 6,380,368; 6,528,640; 6,639,062; 6,617,438; 7,045,610; 7,427,672; and 7,495,088, the entire contents of each of which are hereby incorporated herein by reference.

[0219] The RNA of an iRNA can also be modified to include one or more bicyclic sugar moities. A “bicyclic sugar” is a furanosyl ring modified by the bridging of two atoms. A″bicyclic nucleoside” (“BNA”) is a nucleoside having a sugar moiety comprising a bridge connecting two carbon atoms of the sugar ring, thereby forming a bicyclic ring system. In certain embodiments, the bridge connects the 4′-carbon and the 2′-carbon of the sugar ring. Thus, in some embodiments an agent of the invention may include the RNA of an iRNA can also be modified to include one or more locked nucleic acids (LNA). A locked nucleic acid is a nucleotide having a modified ribose moiety in which the ribose moiety comprises an extra bridge connecting the 2′ and 4′ carbons. In other words, an LNA is a nucleotide comprising a bicyclic sugar moiety comprising a 4′-CH₂—O-2′ bridge. This structure effectively “locks” the ribose in the 3′-endo structural conformation. The addition of locked nucleic acids to siRNAs has been shown to increase siRNA stability in serum, and to reduce off-target effects (Elmen, J. et al., (2005) Nucleic Acids Research 33(1):439-447; Mook, O R. et al., (2007) Mol Canc Ther 6(3): 833-843; Grunweller, A. et al., (2003) Nucleic Acids Research 31(12):3185-3193).

[0220] Examples of bicyclic nucleosides for use in the polynucleotides of the invention include without limitation nucleosides comprising a bridge between the 4′ and the 2′ ribosyl ring atoms. In certain embodiments, the antisense polynucleotide agents of the invention include one or more bicyclic nucleosides comprising a 4′ to 2′ bridge. Examples of such 4′ to 2′ bridged bicyclic nucleosides, include but are not limited to 4′-(CH2)-O-2′ (LNA); 4′-(CH2)—S-2′; 4′- (CH2)₂—O-2′ (ENA); 4′-CH(CH3)—O-2′ (also referred to as “constrained ethyl” or “cEt”) and 4′-CH(CH2OCH₃)—O-2′ (and analogs thereof; see, e.g., U.S. Pat. No. 7,399,845); 4′-C(CH3)(CH3)—O-2′ (and analogs thereof; see e.g., U.S. Pat. No. 8,278,283); 4′-CH2—N(OCH3)-2′ (and analogs thereof; see e.g., U.S. Pat. No. 8,278,425); 4′-CH2-O—N(CH3)-2′ (see, e.g., U.S. Patent Publication No. 2004/0171570); 4′-CH2-N(R)—O-2′, wherein R is H, C1-C12 alkyl, or a protecting group (see, e.g., U.S. Pat. No. 7,427,672); 4′-CH2-C(H)(CH3)-2′ (see, e.g., Chattopadhyaya et al., J. Org. Chem., 2009, 74, 118-134); and 4′-CH2—C(═CH2)-2′ (and analogs thereof; see, e.g., U.S. Pat. No. 8,278,426). The entire contents of each of the foregoing are hereby incorporated herein by reference.

[0221] Additional representative U.S. Patents and US Patent Publications that teach the preparation of locked nucleic acid nucleotides include, but are not limited to, the following: U.S. Pat. Nos. 6,268,490; 6,525,191; 6,670,461; 6,770,748; 6,794,499; 6,998,484; 7,053,207; 7,034,133; 7,084,125; 7,399,845; 7,427,672; 7,569,686; 7,741,457; 8,022,193; 8,030,467; 8,278,425; 8,278,426; 8,278,283; US 2008/0039618; and US 2009/0012281, the entire contents of each of which are hereby incorporated herein by reference.

[0222] Any of the foregoing bicyclic nucleosides can be prepared having one or more stereochemical sugar configurations including for example α-L-ribofuranose and β-D-ribofuranose (see WO 99/14226).

[0223] The RNA of an iRNA can also be modified to include one or more constrained ethyl nucleotides. As used herein, a “constrained ethyl nucleotide” or “cEt” is a locked nucleic acid comprising a bicyclic sugar moiety comprising a 4′-CH(CH3)—O-2′ bridge. In one embodiment, a constrained ethyl nucleotide is in the S conformation referred to herein as “S-cEt.”

[0224] An iRNA of the invention may also include one or more “conformationally restricted nucleotides” (“CRN”). CRN are nucleotide analogs with a linker connecting the C2′ and C4′ carbons of ribose or the C3 and C5′ carbons of ribose. CRN lock the ribose ring into a stable conformation and increase the hybridization affinity to mRNA. The linker is of sufficient length to place the oxygen in an optimal position for stability and affinity resulting in less ribose ring puckering.

[0225] Representative publications that teach the preparation of certain of the above noted CRN include, but are not limited to, US Patent Publication No. 2013/0190383; and PCT publication WO 2013/036868, the entire contents of each of which are hereby incorporated herein by reference.

[0226] One or more of the nucleotides of an iRNA of the invention may also include a hydroxymethyl substituted nucleotide. A “hydroxymethyl substituted nucleotide” is an acyclic 2′-3′-seco-nucleotide, also referred to as an “unlocked nucleic acid” (“UNA”) modification

[0227] Representative U.S. publications that teach the preparation of UNA include, but are not limited to, U.S. Pat. No. 8,314,227; and US Patent Publication Nos. 2013/0096289; 2013/0011922; and 2011/0313020, the entire contents of each of which are hereby incorporated herein by reference.

[0228] Potentially stabilizing modifications to the ends of RNA molecules can include N-(acetylaminocaproyl)-4-hydroxyprolinol (Hyp-C6-NHAc), N-(caproyl-4-hydroxyprolinol (Hyp-C6), N-(acetyl-4-hydroxyprolinol (Hyp-NHAc), thymidine-2′-O-deoxythymidine (ether), N-(aminocaproyl)-4-hydroxyprolinol (Hyp-C6-amino), 2-docosanoyl-uridine-3″-phosphate, inverted base dT(idT) and others. Disclosure of this modification can be found in PCT Publication No. WO 2011/005861.

A. Modified iRNAs Comprising Motifs of the Invention

[0229] In certain aspects of the invention, the double stranded RNAi agents of the invention include agents with chemical modifications as disclosed, for example, in U.S. Provisional Application No. 61/561,710, filed on Nov. 18, 2011, or in PCT/US2012/065691, filed on Nov. 16, 2012, the entire contents of each of which are incorporated herein by reference.

[0230] As shown herein and in Provisional Application No. 61/561,710 or PCT Application No. PCT/US2012/065691, a superior result may be obtained by introducing one or more motifs of three identical modifications on three consecutive nucleotides into a sense strand and/or antisense strand of an RNAi agent, particularly at or near the cleavage site. In some embodiments, the sense strand and antisense strand of the RNAi agent may otherwise be completely modified. The introduction of these motifs interrupts the modification pattern, if present, of the sense and/or antisense strand. The RNAi agent may be optionally conjugated with a GalNAc derivative ligand, for instance on the sense strand. The resulting RNAi agents present superior gene silencing activity.

[0231] More specifically, it has been surprisingly discovered that when the sense strand and antisense strand of the double stranded RNAi agent are completely modified to have one or more motifs of three identical modifications on three consecutive nucleotides at or near the cleavage site of at least one strand of an RNAi agent, the gene silencing acitivity of the RNAi agent was superiorly enhanced.

[0232] Accordingly, the invention provides double stranded RNAi agents capable of inhibiting the expression of a target gene (i.e., a complement component C5 (C5) gene) in vivo. The RNAi agent comprises a sense strand and an antisense strand. Each strand of the RNAi agent may range from 12-30 nucleotides in length. For example, each strand may be between 14-30 nucleotides in length, 17-30 nucleotides in length, 25-30 nucleotides in length, 27-30 nucleotides in length, 17-23 nucleotides in length, 17-21 nucleotides in length, 17-19 nucleotides in length, 19-25 nucleotides in length, 19-23 nucleotides in length, 19-21 nucleotides in length, 21-25 nucleotides in length, or 21-23 nucleotides in length.

[0233] The sense strand and antisense strand typically form a duplex double stranded RNA (“dsRNA”), also referred to herein as an “RNAi agent.” The duplex region of an RNAi agent may be 12-30 nucleotide pairs in length. For example, the duplex region can be between 14-30 nucleotide pairs in length, 17-30 nucleotide pairs in length, 27-30 nucleotide pairs in length, 17-23 nucleotide pairs in length, 17-21 nucleotide pairs in length, 17-19 nucleotide pairs in length, 19-25 nucleotide pairs in length, 19-23 nucleotide pairs in length, 19-21 nucleotide pairs in length, 21-25 nucleotide pairs in length, or 21-23 nucleotide pairs in length. In another example, the duplex region is selected from 15, 16, 17, 18, 19, 20, 21, 22, 23, 24, 25, 26, and 27 nucleotides in length.

[0234] In one embodiment, the RNAi agent may contain one or more overhang regions and/or capping groups at the 3′-end, 5′-end, or both ends of one or both strands. The overhang can be 1-6 nucleotides in length, for instance 2-6 nucleotides in length, 1-5 nucleotides in length, 2-5 nucleotides in length, 1-4 nucleotides in length, 2-4 nucleotides in length, 1-3 nucleotides in length, 2-3 nucleotides in length, or 1-2 nucleotides in length. The overhangs can be the result of one strand being longer than the other, or the result of two strands of the same length being staggered. The overhang can form a mismatch with the target mRNA or it can be complementary to the gene sequences being targeted or can be another sequence. The first and second strands can also be joined, e.g., by additional bases to form a hairpin, or by other non-base linkers.

[0235] In one embodiment, the nucleotides in the overhang region of the RNAi agent can each independently be a modified or unmodified nucleotide including, but no limited to 2′-sugar modified, such as, 2-F, 2′-Omethyl, thymidine (T), 2′-O-methoxyethyl-5-methyluridine (Teo), 2′-O-methoxyethyladenosine (Aeo), 2′-O-methoxyethyl-5-methylcytidine (m5Ceo), and any combinations thereof. For example, TT can be an overhang sequence for either end on either strand. The overhang can form a mismatch with the target mRNA or it can be complementary to the gene sequences being targeted or can be another sequence.

[0236] The 5′- or 3′-overhangs at the sense strand, antisense strand or both strands of the RNAi agent may be phosphorylated. In some embodiments, the overhang region(s) contains two nucleotides having a phosphorothioate between the two nucleotides, where the two nucleotides can be the same or different. In one embodiment, the overhang is present at the 3′-end of the sense strand, antisense strand, or both strands. In one embodiment, this 3′-overhang is present in the antisense strand. In one embodiment, this 3′-overhang is present in the sense strand.

[0237] The RNAi agent may contain only a single overhang, which can strengthen the interference activity of the RNAi, without affecting its overall stability. For example, the single-stranded overhang may be located at the 3′-terminal end of the sense strand or, alternatively, at the 3′-terminal end of the antisense strand. The RNAi may also have a blunt end, located at the 5′-end of the antisense strand (or the 3′-end of the sense strand) or vice versa. Generally, the antisense strand of the RNAi has a nucleotide overhang at the 3′-end, and the 5′-end is blunt. While not wishing to be bound by theory, the asymmetric blunt end at the 5′-end of the antisense strand and 3′-end overhang of the antisense strand favor the guide strand loading into RISC process.

[0238] In one embodiment, the RNAi agent is a double ended bluntmer of 19 nucleotides in length, wherein the sense strand contains at least one motif of three 2′-F modifications on three consecutive nucleotides at positions 7, 8, 9 from the 5′ end. The antisense strand contains at least one motif of three 2′-O-methyl modifications on three consecutive nucleotides at positions 11, 12, 13 from the 5′ end.

[0239] In another embodiment, the RNAi agent is a double ended bluntmer of 20 nucleotides in length, wherein the sense strand contains at least one motif of three 2′-F modifications on three consecutive nucleotides at positions 8, 9, 10 from the 5′ end. The antisense strand contains at least one motif of three 2′-O-methyl modifications on three consecutive nucleotides at positions 11, 12, 13 from the 5′ end.

[0240] In yet another embodiment, the RNAi agent is a double ended bluntmer of 21 nucleotides in length, wherein the sense strand contains at least one motif of three 2′-F modifications on three consecutive nucleotides at positions 9, 10, 11 from the 5′ end. The antisense strand contains at least one motif of three 2′-O-methyl modifications on three consecutive nucleotides at positions 11, 12, 13 from the 5′ end.

[0241] In one embodiment, the RNAi agent comprises a 21 nucleotide sense strand and a 23 nucleotide antisense strand, wherein the sense strand contains at least one motif of three 2′-F modifications on three consecutive nucleotides at positions 9, 10, 11 from the 5′ end; the antisense strand contains at least one motif of three 2′-O-methyl modifications on three consecutive nucleotides at positions 11, 12, 13 from the 5′ end, wherein one end of the RNAi agent is blunt, while the other end comprises a 2 nucleotide overhang. Preferably, the 2 nucleotide overhang is at the 3′-end of the antisense strand. When the 2 nucleotide overhang is at the 3′-end of the antisense strand, there may be two phosphorothioate internucleotide linkages between the terminal three nucleotides, wherein two of the three nucleotides are the overhang nucleotides, and the third nucleotide is a paired nucleotide next to the overhang nucleotide. In one embodiment, the RNAi agent additionally has two phosphorothioate internucleotide linkages between the terminal three nucleotides at both the 5′-end of the sense strand and at the 5′-end of the antisense strand. In one embodiment, every nucleotide in the sense strand and the antisense strand of the RNAi agent, including the nucleotides that are part of the motifs are modified nucleotides. In one embodiment each residue is independently modified with a 2′-O-methyl or 3′-fluoro, e.g., in an alternating motif. Optionally, the RNAi agent further comprises a ligand (preferably GalNAc₃).

[0242] In one embodiment, the RNAi agent comprises a sense and an antisense strand, wherein the sense strand is 25-30 nucleotide residues in length, wherein starting from the 5′ terminal nucleotide (position 1) positions 1 to 23 of the first strand comprise at least 8 ribonucleotides; the antisense strand is 36-66 nucleotide residues in length and, starting from the 3′ terminal nucleotide, comprises at least 8 ribonucleotides in the positions paired with positions 1-23 of sense strand to form a duplex; wherein at least the 3 ‘ terminal nucleotide of antisense strand is unpaired with sense strand, and up to 6 consecutive 3’ terminal nucleotides are unpaired with sense strand, thereby forming a 3′ single stranded overhang of 1-6 nucleotides; wherein the 5′ terminus of antisense strand comprises from 10-30 consecutive nucleotides which are unpaired with sense strand, thereby forming a 10-30 nucleotide single stranded 5′ overhang; wherein at least the sense strand 5′ terminal and 3′ terminal nucleotides are base paired with nucleotides of antisense strand when sense and antisense strands are aligned for maximum complementarity, thereby forming a substantially duplexed region between sense and antisense strands; and antisense strand is sufficiently complementary to a target RNA along at least 19 ribonucleotides of antisense strand length to reduce target gene expression when the double stranded nucleic acid is introduced into a mammalian cell; and wherein the sense strand contains at least one motif of three 2′-F modifications on three consecutive nucleotides, where at least one of the motifs occurs at or near the cleavage site. The antisense strand contains at least one motif of three 2′-O-methyl modifications on three consecutive nucleotides at or near the cleavage site.

[0243] In one embodiment, the RNAi agent comprises sense and antisense strands, wherein the RNAi agent comprises a first strand having a length which is at least 25 and at most 29 nucleotides and a second strand having a length which is at most 30 nucleotides with at least one motif of three 2′-O-methyl modifications on three consecutive nucleotides at position 11, 12, 13 from the 5′ end; wherein the 3′ end of the first strand and the 5′ end of the second strand form a blunt end and the second strand is 1˜4 nucleotides longer at its 3′ end than the first strand, wherein the duplex region which is at least 25 nucleotides in length, and the second strand is sufficiently complementary to a target mRNA along at least 19 nucleotide of the second strand length to reduce target gene expression when the RNAi agent is introduced into a mammalian cell, and wherein dicer cleavage of the RNAi agent preferentially results in an siRNA comprising the 3′ end of the second strand, thereby reducing expression of the target gene in the mammal. Optionally, the RNAi agent further comprises a ligand.

[0244] In one embodiment, the sense strand of the RNAi agent contains at least one motif of three identical modifications on three consecutive nucleotides, where one of the motifs occurs at the cleavage site in the sense strand.

[0245] In one embodiment, the antisense strand of the RNAi agent can also contain at least one motif of three identical modifications on three consecutive nucleotides, where one of the motifs occurs at or near the cleavage site in the antisense strand.

[0246] For an RNAi agent having a duplex region of 17-23 nucleotide in length, the cleavage site of the antisense strand is typically around the 10, 11 and 12 positions from the 5′-end. Thus the motifs of three identical modifications may occur at the 9, 10, 11 positions; 10, 11, 12 positions; 11, 12, 13 positions; 12, 13, 14 positions; or 13, 14, 15 positions of the antisense strand, the count starting from the 1^{st} nucleotide from the 5′-end of the antisense strand, or, the count starting from the 1^{st} paired nucleotide within the duplex region from the 5′-end of the antisense strand. The cleavage site in the antisense strand may also change according to the length of the duplex region of the RNAi from the 5′-end.

[0247] The sense strand of the RNAi agent may contain at least one motif of three identical modifications on three consecutive nucleotides at the cleavage site of the strand; and the antisense strand may have at least one motif of three identical modifications on three consecutive nucleotides at or near the cleavage site of the strand. When the sense strand and the antisense strand form a dsRNA duplex, the sense strand and the antisense strand can be so aligned that one motif of the three nucleotides on the sense strand and one motif of the three nucleotides on the antisense strand have at least one nucleotide overlap, i.e., at least one of the three nucleotides of the motif in the sense strand forms a base pair with at least one of the three nucleotides of the motif in the antisense strand. Alternatively, at least two nucleotides may overlap, or all three nucleotides may overlap.

[0248] In one embodiment, the sense strand of the RNAi agent may contain more than one motif of three identical modifications on three consecutive nucleotides. The first motif may occur at or near the cleavage site of the strand and the other motifs may be a wing modification. The term “wing modification” herein refers to a motif occurring at another portion of the strand that is separated from the motif at or near the cleavage site of the same strand. The wing modification is either adjacent to the first motif or is separated by at least one or more nucleotides. When the motifs are immediately adjacent to each other then the chemistry of the motifs are distinct from each other and when the motifs are separated by one or more nucleotide than the chemistries can be the same or different. Two or more wing modifications may be present. For instance, when two wing modifications are present, each wing modification may occur at one end relative to the first motif which is at or near cleavage site or on either side of the lead motif.

[0249] Like the sense strand, the antisense strand of the RNAi agent may contain more than one motifs of three identical modifications on three consecutive nucleotides, with at least one of the motifs occurring at or near the cleavage site of the strand. This antisense strand may also contain one or more wing modifications in an alignment similar to the wing modifications that may be present on the sense strand.

[0250] In one embodiment, the wing modification on the sense strand or antisense strand of the RNAi agent typically does not include the first one or two terminal nucleotides at the 3′-end, 5′-end or both ends of the strand.

[0251] In another embodiment, the wing modification on the sense strand or antisense strand of the RNAi agent typically does not include the first one or two paired nucleotides within the duplex region at the 3′-end, 5′-end or both ends of the strand.

[0252] When the sense strand and the antisense strand of the RNAi agent each contain at least one wing modification, the wing modifications may fall on the same end of the duplex region, and have an overlap of one, two or three nucleotides.

[0253] When the sense strand and the antisense strand of the RNAi agent each contain at least two wing modifications, the sense strand and the antisense strand can be so aligned that two modifications each from one strand fall on one end of the duplex region, having an overlap of one, two or three nucleotides; two modifications each from one strand fall on the other end of the duplex region, having an overlap of one, two or three nucleotides; two modifications one strand fall on each side of the lead motif, having an overlap of one, two or three nucleotides in the duplex region.

[0254] In one embodiment, every nucleotide in the sense strand and antisense strand of the RNAi agent, including the nucleotides that are part of the motifs, may be modified. Each nucleotide may be modified with the same or different modification which can include one or more alteration of one or both of the non-linking phosphate oxygens and/or of one or more of the linking phosphate oxygens; alteration of a constituent of the ribose sugar, e.g., of the 2′ hydroxyl on the ribose sugar; wholesale replacement of the phosphate moiety with “dephospho” linkers; modification or replacement of a naturally occurring base; and replacement or modification of the ribose-phosphate backbone.

[0255] As nucleic acids are polymers of subunits, many of the modifications occur at a position which is repeated within a nucleic acid, e.g., a modification of a base, or a phosphate moiety, or a non-linking O of a phosphate moiety. In some cases the modification will occur at all of the subject positions in the nucleic acid but in many cases it will not. By way of example, a modification may only occur at a 3′ or 5′ terminal position, may only occur in a terminal region, e.g., at a position on a terminal nucleotide or in the last 2, 3, 4, 5, or 10 nucleotides of a strand. A modification may occur in a double strand region, a single strand region, or in both. A modification may occur only in the double strand region of a RNA or may only occur in a single strand region of a RNA. For example, a phosphorothioate modification at a non-linking O position may only occur at one or both termini, may only occur in a terminal region, e.g., at a position on a terminal nucleotide or in the last 2, 3, 4, 5, or 10 nucleotides of a strand, or may occur in double strand and single strand regions, particularly at termini. The 5′ end or ends can be phosphorylated.

[0256] It may be possible, e.g., to enhance stability, to include particular bases in overhangs, or to include modified nucleotides or nucleotide surrogates, in single strand overhangs, e.g., in a 5′ or 3′ overhang, or in both. For example, it can be desirable to include purine nucleotides in overhangs. In some embodiments all or some of the bases in a 3′ or 5′ overhang may be modified, e.g., with a modification described herein. Modifications can include, e.g., the use of modifications at the 2′ position of the ribose sugar with modifications that are known in the art, e.g., the use of deoxyribonucleotides, 2′-deoxy-2′-fluoro (2′-F) or 2′-O-methyl modified instead of the ribosugar of the nucleobase, and modifications in the phosphate group, e.g., phosphorothioate modifications. Overhangs need not be homologous with the target sequence.

[0257] In one embodiment, each residue of the sense strand and antisense strand is independently modified with LNA, HNA, CeNA, 2′-methoxyethyl, 2′-O-methyl, 2′-O-allyl, 2′—C-allyl, 2′-deoxy, 2′-hydroxyl, or 2′-fluoro. The strands can contain more than one modification. In one embodiment, each residue of the sense strand and antisense strand is independently modified with 2′-O-methyl or 2′-fluoro.

[0258] At least two different modifications are typically present on the sense strand and antisense strand. Those two modifications may be the 2′-O-methyl or 2′-fluoro modifications, or others.

[0259] In one embodiment, the Nₐ and/or N_{b} comprise modifications of an alternating pattern. The term “alternating motif” as used herein refers to a motif having one or more modifications, each modification occurring on alternating nucleotides of one strand. The alternating nucleotide may refer to one per every other nucleotide or one per every three nucleotides, or a similar pattern. For example, if A, B and C each represent one type of modification to the nucleotide, the alternating motif can be “ABABABABABAB . . . ,” “AABBAABBAABB . . . , “AABAABAABAAB . . . ,” “AAABAAABAAAB . . . ,” “AAABBBAAABBB . . . ,” or “ABCABCABCABC . . . ,” etc.

[0260] The type of modifications contained in the alternating motif may be the same or different. For example, if A, B, C, D each represent one type of modification on the nucleotide, the alternating pattern, i.e., modifications on every other nucleotide, may be the same, but each of the sense strand or antisense strand can be selected from several possibilities of modifications within the alternating motif such as “ABABAB . . . “, “ACACAC . . . ” “BDBDBD . . . ” or “CDCDCD . . . ,” etc.

[0261] In one embodiment, the RNAi agent of the invention comprises the modification pattern for the alternating motif on the sense strand relative to the modification pattern for the alternating motif on the antisense strand is shifted. The shift may be such that the modified group of nucleotides of the sense strand corresponds to a differently modified group of nucleotides of the antisense strand and vice versa. For example, the sense strand when paired with the antisense strand in the dsRNA duplex, the alternating motif in the sense strand may start with “ABABAB” from 5′-3′ of the strand and the alternating motif in the antisense strand may start with “BABABA” from 5′-3′ of the strand within the duplex region. As another example, the alternating motif in the sense strand may start with “AABBAABB” from 5′-3′ of the strand and the alternating motif in the antisenese strand may start with “BBAABBAA” from 5′-3′ of the strand within the duplex region, so that there is a complete or partial shift of the modification patterns between the sense strand and the antisense strand.

[0262] In one embodiment, the RNAi agent comprises the pattern of the alternating motif of 2′-O-methyl modification and 2′-F modification on the sense strand initially has a shift relative to the pattern of the alternating motif of 2′-O-methyl modification and 2′-F modification on the antisense strand initially, i.e., the 2′-O-methyl modified nucleotide on the sense strand base pairs with a 2′-F modified nucleotide on the antisense strand and vice versa. The 1 position of the sense strand may start with the 2′-F modification, and the 1 position of the antisense strand may start with the 2′-O-methyl modification.

[0263] The introduction of one or more motifs of three identical modifications on three consecutive nucleotides to the sense strand and/or antisense strand interrupts the initial modification pattern present in the sense strand and/or antisense strand. This interruption of the modification pattern of the sense and/or antisense strand by introducing one or more motifs of three identical modifications on three consecutive nucleotides to the sense and/or antisense strand surprisingly enhances the gene silencing activity to the target gene.

[0264] In one embodiment, when the motif of three identical modifications on three consecutive nucleotides is introduced to any of the strands, the modification of the nucleotide next to the motif is a different modification than the modification of the motif. For example, the portion of the sequence containing the motif is “ . . . . NₐYYYN_{b} . . . ,” where “Y” represents the modification of the motif of three identical modifications on three consecutive nucleotide, and “Nₐ” and “N_{b}” represent a modification to the nucleotide next to the motif “YYY” that is different than the modification of Y, and where Nₐ and N_{b} can be the same or different modifications. Alternatively, Nₐ and/or N_{b} may be present or absent when there is a wing modification present.

[0265] The RNAi agent may further comprise at least one phosphorothioate or methylphosphonate internucleotide linkage. The phosphorothioate or methylphosphonate internucleotide linkage modification may occur on any nucleotide of the sense strand or antisense strand or both strands in any position of the strand. For instance, the internucleotide linkage modification may occur on every nucleotide on the sense strand and/or antisense strand; each internucleotide linkage modification may occur in an alternating pattern on the sense strand and/or antisense strand; or the sense strand or antisense strand may contain both internucleotide linkage modifications in an alternating pattern. The alternating pattern of the internucleotide linkage modification on the sense strand may be the same or different from the antisense strand, and the alternating pattern of the internucleotide linkage modification on the sense strand may have a shift relative to the alternating pattern of the internucleotide linkage modification on the antisense strand. In one embodiment, a double-stranded RNAi agent comprises 6-8phosphorothioate internucleotide linkages. In one embodiment, the antisense strand comprises two phosphorothioate internucleotide linkages at the 5′-terminus and two phosphorothioate internucleotide linkages at the 3′-terminus, and the sense strand comprises at least two phosphorothioate internucleotide linkages at either the 5′-terminus or the 3′-terminus.

[0266] In one embodiment, the RNAi comprises a phosphorothioate or methylphosphonate internucleotide linkage modification in the overhang region. For example, the overhang region may contain two nucleotides having a phosphorothioate or methylphosphonate internucleotide linkage between the two nucleotides. Internucleotide linkage modifications also may be made to link the overhang nucleotides with the terminal paired nucleotides within the duplex region. For example, at least 2, 3, 4, or all the overhang nucleotides may be linked through phosphorothioate or methylphosphonate internucleotide linkage, and optionally, there may be additional phosphorothioate or methylphosphonate internucleotide linkages linking the overhang nucleotide with a paired nucleotide that is next to the overhang nucleotide. For instance, there may be at least two phosphorothioate internucleotide linkages between the terminal three nucleotides, in which two of the three nucleotides are overhang nucleotides, and the third is a paired nucleotide next to the overhang nucleotide. These terminal three nucleotides may be at the 3′-end of the antisense strand, the 3′-end of the sense strand, the 5′-end of the antisense strand, and/or the 5′ end of the antisense strand.

[0267] In one embodiment, the 2 nucleotide overhang is at the 3′-end of the antisense strand, and there are two phosphorothioate internucleotide linkages between the terminal three nucleotides, wherein two of the three nucleotides are the overhang nucleotides, and the third nucleotide is a paired nucleotide next to the overhang nucleotide. Optionally, the RNAi agent may additionally have two phosphorothioate internucleotide linkages between the terminal three nucleotides at both the 5′-end of the sense strand and at the 5′-end of the antisense strand.

[0268] In one embodiment, the RNAi agent comprises mismatch(es) with the target, within the duplex, or combinations thereof. The mistmatch may occur in the overhang region or the duplex region. The base pair may be ranked on the basis of their propensity to promote dissociation or melting (e.g., on the free energy of association or dissociation of a particular pairing, the simplest approach is to examine the pairs on an individual pair basis, though next neighbor or similar analysis can also be used). In terms of promoting dissociation: A: U is preferred over G:C; G:U is preferred over G:C; and I:C is preferred over G:C (I=inosine). Mismatches, e.g., non-canonical or other than canonical pairings (as described elsewhere herein) are preferred over canonical (A:T, A:U, G:C) pairings; and pairings which include a universal base are preferred over canonical pairings.

[0269] In one embodiment, the RNAi agent comprises at least one of the first 1, 2, 3, 4, or 5 base pairs within the duplex regions from the 5′-end of the antisense strand independently selected from the group of: A:U, G:U, I:C, and mismatched pairs, e.g., non-canonical or other than canonical pairings or pairings which include a universal base, to promote the dissociation of the antisense strand at the 5′-end of the duplex.

[0270] In one embodiment, the nucleotide at the 1 position within the duplex region from the 5′-end in the antisense strand is selected from the group consisting of A, dA, dU, U, and dT. Alternatively, at least one of the first 1, 2 or 3 base pair within the duplex region from the 5′-end of the antisense strand is an AU base pair. For example, the first base pair within the duplex region from the 5′-end of the antisense strand is an AU base pair.

[0271] In another embodiment, the nucleotide at the 3′-end of the sense strand is deoxy-thymine (dT). In another embodiment, the nucleotide at the 3′-end of the antisense strand is deoxy-thymine (dT). In one embodiment, there is a short sequence of deoxy-thymine nucleotides, for example, two dT nucleotides on the 3′-end of the sense and/or antisense strand.

[0272] In one embodiment, the sense strand sequence may be represented by formula (I):

5′nₚ-Nₐ—(X X X)ᵢ—N_{b}—Y Y Y—N_{b}—(Z Z Z)ⱼ—Nₐ-n_{q}3′ (I)
[0273] wherein:
[0274] i and j are each independently 0 or 1;
[0275] p and q are each independently 0-6;
[0276] each Nₐ independently represents an oligonucleotide sequence comprising 0-25 modified nucleotides, each sequence comprising at least two differently modified nucleotides;
[0277] each N_{b} independently represents an oligonucleotide sequence comprising 0-10 modified nucleotides;
[0278] each nₚ and n_{q} independently represent an overhang nucleotide;
[0279] wherein N_{b} and Y do not have the same modification; and
[0280] XXX, YYY and ZZZ each independently represent one motif of three identical modifications on three consecutive nucleotides. Preferably YYY is all 2′-F modified nucleotides.

[0281] In one embodiment, the Nₐ and/or N_{b} comprise modifications of alternating pattern.

[0282] In one embodiment, the YYY motif occurs at or near the cleavage site of the sense strand. For example, when the RNAi agent has a duplex region of 17-23 nucleotides in length, the YYY motif can occur at or the vicinity of the cleavage site (e.g.: can occur at positions 6, 7, 8, 7, 8, 9, 8, 9, 10, 9, 10, 11, 10, 11, 12 or 11, 12, 13) of the sense strand, the count starting from the 1^{st} nucleotide, from the 5′-end; or optionally, the count starting at the 1^{st} paired nucleotide within the duplex region, from the 5′-end.

[0283] In one embodiment, i is 1 and j is 0, or i is 0 and j is 1, or both i and j are 1. The sense strand can therefore be represented by the following formulas:

5′nₚ-Nₐ—YYY—N_{b}—ZZZ—Nₐ-n_{q}3′ (Ib);

5′nₚ-Nₐ—XXX—N_{b}—YYY—Nₐ-n_{q}3′ (Ic); or

5′nₚ-Nₐ—XXX—N_{b}—YYY—N_{b}—ZZZ—Nₐ-n_{q}3′ (Id).

[0284] When the sense strand is represented by formula (Ib), N_{b} represents an oligonucleotide sequence comprising 0-10, 0-7, 0-5, 0-4, 0-2 or 0 modified nucleotides. Each Nₐ independently can represent an oligonucleotide sequence comprising 2-20, 2-15, or 2-10 modified nucleotides.

[0285] When the sense strand is represented as formula (Ic), N_{b} represents an oligonucleotide sequence comprising 0-10, 0-7, 0-10, 0-7, 0-5, 0-4, 0-2 or 0 modified nucleotides. Each Nₐ can independently represent an oligonucleotide sequence comprising 2-20, 2-15, or 2-10 modified nucleotides.

[0286] When the sense strand is represented as formula (Id), each N_{b} independently represents an oligonucleotide sequence comprising 0-10, 0-7, 0-5, 0-4, 0-2 or 0 modified nucleotides. Preferably, N_{b} is 0, 1, 2, 3, 4, 5 or 6 Each Nₐ can independently represent an oligonucleotide sequence comprising 2-20, 2-15, or 2-10 modified nucleotides.

[0287] Each of X, Y and Z may be the same or different from each other.

[0288] In other embodiments, i is 0 and j is 0, and the sense strand may be represented by the formula:

5′nₚ—Nₐ—YYY—Nₐ-n_{q}3′ (Ia).

[0289] When the sense strand is represented by formula (Ia), each Nₐ independently can represent an oligonucleotide sequence comprising 2-20, 2-15, or 2-10 modified nucleotides.

[0290] In one embodiment, the antisense strand sequence of the RNAi may be represented by formula (II):

5′n_{q}-Nₐ′- (Z′Z′Z′)ₖ—N_{b}′- Y′Y′Y′—N_{b}′- (X′X′X′)ₗ—N′ₐ-nₚ′3′ (II)
[0291] wherein:
[0292] k and l are each independently 0 or 1;
[0293] p′ and q′ are each independently 0-6;
[0294] each Nₐ′ independently represents an oligonucleotide sequence comprising 0-25 modified nucleotides, each sequence comprising at least two differently modified nucleotides;
[0295] each N_{b}′ independently represents an oligonucleotide sequence comprising 0-10 modified nucleotides;
[0296] each nₚ′ and n_{q}′ independently represent an overhang nucleotide;
[0297] wherein N_{b}′ and Y′ do not have the same modification;
[0298] and
[0299] X′X′X′, Y′Y′Y′ and Z′Z′Z′ each independently represent one motif of three identical modifications on three consecutive nucleotides.

[0300] In one embodiment, the Nₐ′ and/or N_{b}′ comprise modifications of alternating pattern.

[0301] The Y′Y′Y′ motif occurs at or near the cleavage site of the antisense strand. For example, when the RNAi agent has a duplex region of 17-23nucleotidein length, the Y′Y′Y′ motif can occur at positions 9, 10, 11; 10, 11, 12; 11, 12, 13; 12, 13, 14; or 13, 14, 15 of the antisense strand, with the count starting from the 1^{st} nucleotide, from the 5′-end; or optionally, the count starting at the 1^{st} paired nucleotide within the duplex region, from the 5′-end. Preferably, the Y′Y′Y′ motif occurs at positions 11, 12, 13.

[0302] In one embodiment, Y′Y′Y′ motif is all 2′-OMe modified nucleotides.

[0303] In one embodiment, k is 1 and 1 is 0, or k is 0 and 1 is 1, or both k and l are 1. The antisense strand can therefore be represented by the following formulas:

5′n_{q}′- Nₐ′- Z′Z′Z′—N_{b}′- Y′Y′Y′—Nₐ′-nₚ3′ (IIb);

5′n_{q}—Nₐ′- Y′Y′Y′—N_{b}′- X′X′X′-nₚ3′ (IIc); or

5′n_{q}—Nₐ′- Z′Z′Z′—N_{b}′- Y′Y′Y′—N_{b}′- X′X′X′—Nₐ′-nₚ3′ (IId).

[0304] When the antisense strand is represented by formula (IIb), N_{b} represents an oligonucleotide sequence comprising 0-10, 0-7, 0-10, 0-7, 0-5, 0-4, 0-2 or 0 modified nucleotides. Each Nₐ′ independently represents an oligonucleotide sequence comprising 2-20, 2-15, or 2-10 modified nucleotides.

[0305] When the antisense strand is represented as formula (IIc), No′ represents an oligonucleotide sequence comprising 0-10, 0-7, 0-10, 0-7, 0-5, 0-4, 0-2 or 0 modified nucleotides. Each Nₐ′ independently represents an oligonucleotide sequence comprising 2-20, 2-15, or 2-10 modified nucleotides.

[0306] When the antisense strand is represented as formula (IId), each N_{b}′ independently represents an oligonucleotide sequence comprising 0-10, 0-7, 0-10, 0-7, 0-5, 0-4, 0-2 or 0 modified nucleotides. Each Nₐ′ independently represents an oligonucleotide sequence comprising 2-20, 2-15, or 2-10 modified nucleotides. Preferably, N_{b} is 0, 1, 2, 3, 4, 5 or 6.

[0307] In other embodiments, k is 0 and 1 is 0 and the antisense strand may be represented by the formula:

5′nₚ—Nₐ—Y′Y′Y′—Nₐ′-n_{q}′3′ (Ia).

[0308] When the antisense strand is represented as formula (IIa), each Nₐ′ independently represents an oligonucleotide sequence comprising 2-20, 2-15, or 2-10 modified nucleotides. Each of X′, Y′ and Z′ may be the same or different from each other.

[0309] Each nucleotide of the sense strand and antisense strand may be independently modified with LNA, HNA, CeNA, 2′-methoxyethyl, 2′-O-methyl, 2′-O-allyl, 2′-C-allyl, 2′-hydroxyl, or 2′-fluoro. For example, each nucleotide of the sense strand and antisense strand is independently modified with 2′-O-methyl or 2′-fluoro. Each X, Y, Z, X′, Y′ and Z′, in particular, may represent a 2′-O-methyl modification or a 2′-fluoro modification.

[0310] In one embodiment, the sense strand of the RNAi agent may contain YYY motif occurring at 9, 10 and 11 positions of the strand when the duplex region is 21 nt, the count starting from the 1^{st} nucleotide from the 5′-end, or optionally, the count starting at the 1^{st} paired nucleotide within the duplex region, from the 5′-end; and Y represents 2′-F modification. The sense strand may additionally contain XXX motif or ZZZ motifs as wing modifications at the opposite end of the duplex region; and XXX and ZZZ each independently represents a 2′-OMe modification or 2′-F modification.

[0311] In one embodiment the antisense strand may contain Y′Y′Y′ motif occurring at positions 11, 12, 13 of the strand, the count starting from the 1^{st} nucleotide from the 5′-end, or optionally, the count starting at the 1^{st} paired nucleotide within the duplex region, from the 5′-end; and Y′ represents 2′-O-methyl modification. The antisense strand may additionally contain X′X′X′ motif or Z′Z′Z′ motifs as wing modifications at the opposite end of the duplex region; and X′X′X′ and Z′Z′Z′ each independently represents a 2′-OMe modification or 2′-F modification.

[0312] The sense strand represented by any one of the above formulas (Ia), (Ib), (Ic), and (Id) forms a duplex with a antisense strand being represented by any one of formulas (IIa), (IIb), (IIc), and (IId), respectively.

[0313] Accordingly, the RNAi agents for use in the methods of the invention may comprise a sense strand and an antisense strand, each strand having 14 to 30 nucleotides, the RNAi duplex represented by formula (III):

sense: 5′nₚ—Nₐ—(X X X)ᵢ—N_{b}—Y Y Y—N_{b}—(Z Z Z)ⱼ—Nₐ-n_{q}3′antisense: 3′nₚ—Nₐ—(X′X′X′)ₖ—N_{b}—Y′Y′Y′—N_{b}—(Z′Z′Z′)ₗ—Nₐ-n_{q}5′ (III)
[0314] wherein:
[0315] i, j, k, and I are each independently 0 or 1;
[0316] p, p′, q, and q′ are each independently 0-6;
[0317] each Nₐ and N_{b} independently represents an oligonucleotide sequence comprising 0-25 modified nucleotides, each sequence comprising at least two differently modified nucleotides; each N_{b} and N_{b} independently represents an oligonucleotide sequence comprising 0-10 modified nucleotides;
[0318] wherein
[0319] each nₚ′, nₚ, n_{q}′, and n_{q}, each of which may or may not be present, independently represents an overhang nucleotide; and
[0320] XXX, YYY, ZZZ, X′X′X′, Y′Y′Y′, and Z′Z′Z′ each independently represent one motif of three identical modifications on three consecutive nucleotides.

[0321] In one embodiment, i is 0 and j is 0; or i is 1 and j is 0; or i is 0 and j is 1; or both i and j are 0; or both i and j are 1. In another embodiment, k is 0 and 1 is 0; or k is 1 and 1 is 0; k is 0 and l is 1; or both k and l are 0; or both k and l are 1.

[0322] Exemplary combinations of the sense strand and antisense strand forming a RNAi duplex include the formulas below:

5′nₚ—Nₐ—Y Y Y—Nₐ-n_{q}3′3′nₚ—Nₐ—Y′Y′Y′—Nₐn_{q}5′ (IIIa)

5′nₚ—Nₐ—Y Y Y—N_{b}—ZZZ—Nₐ-n_{q}3′3′nₚ—Nₐ—Y′Y′Y′—N_{b}—Z′Z′Z′—Nₐn_{q}5′ (IIIb)

5′nₚ—Nₐ—X X X—N_{b}—Y Y Y—Nₐ-n_{q}3′3′nₚ—Nₐ—X′X′X′—N_{b}—Y′Y′Y′—Nₐ-n_{q}5′ (IIIc)

5′nₚ—Nₐ—X X X—N_{b}—Y Y Y—N_{b}—ZZZ—Nₐ-n_{q}3′3′nₚ—Nₐ—X′X′X′—N_{b}—Y′Y′Y′—N_{b}—Z′Z′Z′—Nₐ-n_{q}5′ (IIId)

[0323] When the RNAi agent is represented by formula (IIIa), each Nₐ independently represents an oligonucleotide sequence comprising 2-20, 2-15, or 2-10 modified nucleotides.

[0324] When the RNAi agent is represented by formula (IIIb), each N_{b} independently represents an oligonucleotide sequence comprising 1-10, 1-7, 1-5 or 1-4 modified nucleotides. Each Nₐ independently represents an oligonucleotide sequence comprising 2-20, 2-15, or 2-10 modified nucleotides.

[0325] When the RNAi agent is represented as formula (IIIc), each N_{b}, N_{b}′ independently represents an oligonucleotide sequence comprising 0-10, 0-7, 0-10, 0-7, 0-5, 0-4, 0-2 or 0modified nucleotides. Each Nₐ independently represents an oligonucleotide sequence comprising 2-20, 2-15, or 2-10 modified nucleotides.

[0326] When the RNAi agent is represented as formula (IIId), each N_{b}, N_{b}′ independently represents an oligonucleotide sequence comprising 0-10, 0-7, 0-10, 0-7, 0-5, 0-4, 0-2 or 0modified nucleotides. Each Nₐ, Nₐ independently represents an oligonucleotide sequence comprising 2-20, 2-15, or 2-10 modified nucleotides. Each of Nₐ, Nₐ′, N_{b} and N_{b} independently comprises modifications of alternating pattern.

[0327] Each of X, Y and Z in formulas (III), (IIIa), (IIIb), (IIIc), and (IIId) may be the same or different from each other.

[0328] When the RNAi agent is represented by formula (III), (IIIa), (IIIb), (IIIc), and (IIId), at least one of the Y nucleotides may form a base pair with one of the Y′ nucleotides. Alternatively, at least two of the Y nucleotides form base pairs with the corresponding Y′ nucleotides; or all three of the Y nucleotides all form base pairs with the corresponding Y′ nucleotides.

[0329] When the RNAi agent is represented by formula (IIIb) or (IIId), at least one of the Z nucleotides may form a base pair with one of the Z′ nucleotides. Alternatively, at least two of the Z nucleotides form base pairs with the corresponding Z′ nucleotides; or all three of the Z nucleotides all form base pairs with the corresponding Z′ nucleotides.

[0330] When the RNAi agent is represented as formula (IIIc) or (IIId), at least one of the X nucleotides may form a base pair with one of the X′ nucleotides. Alternatively, at least two of the X nucleotides form base pairs with the corresponding X′ nucleotides; or all three of the X nucleotides all form base pairs with the corresponding X′ nucleotides.

[0331] In one embodiment, the modification on the Y nucleotide is different than the modification on the Y′ nucleotide, the modification on the Z nucleotide is different than the modification on the Z′ nucleotide, and/or the modification on the X nucleotide is different than the modification on the X′ nucleotide.

[0332] In one embodiment, when the RNAi agent is represented by formula (IIId), the Nₐ modifications are 2′-O-methyl or 2′-fluoro modifications. In another embodiment, when the RNAi agent is represented by formula (IIId), the Nₐ modifications are 2′-O-methyl or 2′-fluoro modifications and nₚ′>0 and at least one nₚ′ is linked to a neighboring nucleotide a via phosphorothioate linkage. In yet another embodiment, when the RNAi agent is represented by formula (IIId), the Nₐ modifications are 2′-O-methyl or 2′-fluoro modifications, nₚ′>0 and at least one nₚ′ is linked to a neighboring nucleotide via phosphorothioate linkage, and the sense strand is conjugated to one or more GalNAc derivatives attached through a bivalent or trivalent branched linker (described below). In another embodiment, when the RNAi agent is represented by formula (IIId), the Nₐ modifications are 2′-O-methyl or 2′-fluoro modifications, nₚ′>0 and at least one nₚ′ is linked to a neighboring nucleotide via phosphorothioate linkage, the sense strand comprises at least one phosphorothioate linkage, and the sense strand is conjugated to one or more GalNAc derivatives attached through a bivalent or trivalent branched linker.

[0333] In one embodiment, when the RNAi agent is represented by formula (IIIa), the Nₐ modifications are 2′-O-methyl or 2′-fluoro modifications, nₚ′>0 and at least one nₚ′ is linked to a neighboring nucleotide via phosphorothioate linkage, the sense strand comprises at least one phosphorothioate linkage, and the sense strand is conjugated to one or more GalNAc derivatives attached through a bivalent or trivalent branched linker.

[0334] In one embodiment, the RNAi agent is a multimer containing at least two duplexes represented by formula (III), (IIIa), (IIIb), (IIIc), and (IIId), wherein the duplexes are connected by a linker. The linker can be cleavable or non-cleavable. Optionally, the multimer further comprises a ligand. Each of the duplexes can target the same gene or two different genes; or each of the duplexes can target same gene at two different target sites.

[0335] In one embodiment, the RNAi agent is a multimer containing three, four, five, six or more duplexes represented by formula (III), (IIIa), (IIIb), (IIIc), and (IIId), wherein the duplexes are connected by a linker. The linker can be cleavable or non-cleavable. Optionally, the multimer further comprises a ligand. Each of the duplexes can target the same gene or two different genes; or each of the duplexes can target same gene at two different target sites.

[0336] In one embodiment, two RNAi agents represented by formula (III), (IIIa), (IIIb), (IIIc), and (IIId) are linked to each other at the 5′ end, and one or both of the 3′ ends and are optionally conjugated to a ligand. Each of the agents can target the same gene or two different genes; or each of the agents can target same gene at two different target sites.

[0337] Various publications describe multimeric RNAi agents that can be used in the methods of the invention. Such publications include WO2007/091269, U.S. Pat. No. 7,858,769, WO2010/141511, WO2007/117686, WO2009/014887 and WO2011/031520 the entire contents of each of which are hereby incorporated herein by reference.

[0338] As described in more detail below, the RNAi agent that contains conjugations of one or more carbohydrate moieties to a RNAi agent can optimize one or more properties of the RNAi agent. In many cases, the carbohydrate moiety will be attached to a modified subunit of the RNAi agent. For example, the ribose sugar of one or more ribonucleotide subunits of a dsRNA agent can be replaced with another moiety, e.g., a non-carbohydrate (preferably cyclic) carrier to which is attached a carbohydrate ligand. A ribonucleotide subunit in which the ribose sugar of the subunit has been so replaced is referred to herein as a ribose replacement modification subunit (RRMS). A cyclic carrier may be a carbocyclic ring system, i.e., all ring atoms are carbon atoms, or a heterocyclic ring system, i.e., one or more ring atoms may be a heteroatom, e.g., nitrogen, oxygen, sulfur. The cyclic carrier may be a monocyclic ring system, or may contain two or more rings, e.g. fused rings. The cyclic carrier may be a fully saturated ring system, or it may contain one or more double bonds.

[0339] The ligand may be attached to the polynucleotide via a carrier. The carriers include (i) at least one “backbone attachment point,” preferably two “backbone attachment points” and (ii) at least one “tethering attachment point.” A “backbone attachment point” as used herein refers to a functional group, e.g. a hydroxyl group, or generally, a bond available for, and that is suitable for incorporation of the carrier into the backbone, e.g., the phosphate, or modified phosphate, e.g., sulfur containing, backbone, of a ribonucleic acid. A “tethering attachment point” (TAP) in some embodiments refers to a constituent ring atom of the cyclic carrier, e.g., a carbon atom or a heteroatom (distinct from an atom which provides a backbone attachment point), that connects a selected moiety. The moiety can be, e.g., a carbohydrate, e.g. monosaccharide, disaccharide, trisaccharide, tetrasaccharide, oligosaccharide and polysaccharide. Optionally, the selected moiety is connected by an intervening tether to the cyclic carrier. Thus, the cyclic carrier will often include a functional group, e.g., an amino group, or generally, provide a bond, that is suitable for incorporation or tethering of another chemical entity, e.g., a ligand to the constituent ring.

[0340] The RNAi agents may be conjugated to a ligand via a carrier, wherein the carrier can be cyclic group or acyclic group; preferably, the cyclic group is selected from pyrrolidinyl, pyrazolinyl, pyrazolidinyl, imidazolinyl, imidazolidinyl, piperidinyl, piperazinyl, [1,3]dioxolane, oxazolidinyl, isoxazolidinyl, morpholinyl, thiazolidinyl, isothiazolidinyl, quinoxalinyl, pyridazinonyl, tetrahydrofuryl and decalin; preferably, the acyclic group is selected from serinol backbone or diethanolamine backbone.

[0341] In certain specific embodiments, the RNAi agent for use in the methods of the invention is an agent selected from the group of agents listed in any one of Tables 3, 4, 5, 6, 18, 19, 20, 21, and 23. These agents may further comprise a ligand.

IV. iRNAs Conjugated to Ligands

[0342] Another modification of the RNA of an iRNA of the invention involves chemically linking to the RNA one or more ligands, moieties or conjugates that enhance the activity, cellular distribution or cellular uptake of the iRNA. Such moieties include but are not limited to lipid moieties such as a cholesterol moiety (Letsinger et al., Proc. Natl. Acid. Sci. USA, 1989, 86:6553-6556), cholic acid (Manoharan et al., Biorg. Med. Chem. Let., 1994, 4:1053-1060), a thioether, e.g., beryl-S-tritylthiol (Manoharan et al., Ann. N.Y. Acad. Sci., 1992, 660:306-309; Manoharan et al., Biorg. Med. Chem. Let., 1993, 3:2765-2770), a thiocholesterol (Oberhauser et al., Nucl. Acids Res., 1992, 20:533-538), an aliphatic chain, e.g., dodecandiol or undecyl residues (Saison-Behmoaras et al., EMBO J, 1991, 10:1111-1118; Kabanov et al., FEBS Lett., 1990, 259:327-330; Svinarchuk et al., Biochimie, 1993, 75:49-54), a phospholipid, e.g., di-hexadecyl-rac-glycerol or triethyl-ammonium 1,2-di-O-hexadecyl-rac-glycero-3-phosphonate (Manoharan et al., Tetrahedron Lett., 1995, 36:3651-3654; Shea et al., Nucl. Acids Res., 1990, 18:3777-3783), a polyamine or a polyethylene glycol chain (Manoharan et al., Nucleosides & Nucleotides, 1995, 14:969-973), or adamantane acetic acid (Manoharan et al., Tetrahedron Lett., 1995, 36:3651-3654), a palmityl moiety (Mishra et al., Biochim. Biophys. Acta, 1995, 1264:229-237), or an octadecylamine or hexylamino-carbonyloxycholesterol moiety (Crooke et al., J. Pharmacol. Exp. Ther., 1996, 277:923-937).

[0343] In one embodiment, a ligand alters the distribution, targeting or lifetime of an iRNA agent into which it is incorporated. In preferred embodiments a ligand provides an enhanced affinity for a selected target, e.g., molecule, cell or cell type, compartment, e.g., a cellular or organ compartment, tissue, organ or region of the body, as, e.g., compared to a species absent such a ligand. Preferred ligands will not take part in duplex pairing in a duplexed nucleic acid.

[0344] Ligands can include a naturally occurring substance, such as a protein (e.g., human serum albumin (HSA), low-density lipoprotein (LDL), or globulin); carbohydrate (e.g., a dextran, pullulan, chitin, chitosan, inulin, cyclodextrin, N-acetylgalactosamine, or hyaluronic acid); or a lipid. The ligand can also be a recombinant or synthetic molecule, such as a synthetic polymer, e.g., a synthetic polyamino acid. Examples of polyamino acids include polyamino acid is a polylysine (PLL), poly L-aspartic acid, poly L-glutamic acid, styrene-maleic acid anhydride copolymer, poly(L-lactide-co-glycolied) copolymer, divinyl ether-maleic anhydride copolymer, N-(2-hydroxypropyl)methacrylamide copolymer (HMPA), polyethylene glycol (PEG), polyvinyl alcohol (PVA), polyurethane, poly(2-ethylacryllic acid), N-isopropylacrylamide polymers, or polyphosphazine. Example of polyamines include: polyethylenimine, polylysine (PLL), spermine, spermidine, polyamine, pseudopeptide-polyamine, peptidomimetic polyamine, dendrimer polyamine, arginine, amidine, protamine, cationic lipid, cationic porphyrin, quaternary salt of a polyamine, or an alpha helical peptide.

[0345] Ligands can also include targeting groups, e.g., a cell or tissue targeting agent, e.g., a lectin, glycoprotein, lipid or protein, e.g., an antibody, that binds to a specified cell type such as a kidney cell. A targeting group can be a thyrotropin, melanotropin, lectin, glycoprotein, surfactant protein A, Mucin carbohydrate, multivalent lactose, multivalent galactose, N-acetyl-galactosamine, N-acetyl-gulucoseamine multivalent mannose, multivalent fucose, glycosylated polyaminoacids, multivalent galactose, transferrin, bisphosphonate, polyglutamate, polyaspartate, a lipid, cholesterol, a steroid, bile acid, folate, vitamin B12, vitamin A, biotin, or an RGD peptide or RGD peptide mimetic.

[0346] Other examples of ligands include dyes, intercalating agents (e.g. acridines), cross-linkers (e.g. psoralene, mitomycin C), porphyrins (TPPC4, texaphyrin, Sapphyrin), polycyclic aromatic hydrocarbons (e.g., phenazine, dihydrophenazine), artificial endonucleases (e.g. EDTA), lipophilic molecules, e.g., cholesterol, cholic acid, adamantane acetic acid, 1-pyrene butyric acid, dihydrotestosterone, 1,3-Bis-O(hexadecyl)glycerol, geranyloxyhexyl group, hexadecylglycerol, borneol, menthol, 1,3-propanediol, heptadecyl group, palmitic acid, myristic acid, O3-(oleoyl)lithocholic acid, O3-(oleoyl)cholenic acid, dimethoxytrityl, or phenoxazine) and peptide conjugates (e.g., antennapedia peptide, Tat peptide), alkylating agents, phosphate, amino, mercapto, PEG (e.g., PEG-40K), MPEG, [MPEG]₂, polyamino, alkyl, substituted alkyl, radiolabeled markers, enzymes, haptens (e.g. biotin), transport/absorption facilitators (e.g., aspirin, vitamin E, folic acid), synthetic ribonucleases (e.g., imidazole, bisimidazole, histamine, imidazole clusters, acridine-imidazole conjugates, Eu3+ complexes of tetraazamacrocycles), dinitrophenyl, HRP, or AP.

[0347] Ligands can be proteins, e.g., glycoproteins, or peptides, e.g., molecules having a specific affinity for a co-ligand, or antibodies e.g., an antibody, that binds to a specified cell type such as a hepatic cell. Ligands can also include hormones and hormone receptors. They can also include non-peptidic species, such as lipids, lectins, carbohydrates, vitamins, cofactors, multivalent lactose, multivalent galactose, N-acetyl-galactosamine, N-acetyl-gulucosamine multivalent mannose, or multivalent fucose. The ligand can be, for example, a lipopolysaccharide, an activator of p38 MAP kinase, or an activator of NF-κB.

[0348] The ligand can be a substance, e.g., a drug, which can increase the uptake of the iRNA agent into the cell, for example, by disrupting the cell's cytoskeleton, e.g., by disrupting the cell's microtubules, microfilaments, and/or intermediate filaments. The drug can be, for example, taxon, vincristine, vinblastine, cytochalasin, nocodazole, japlakinolide, latrunculin A, phalloidin, swinholide A, indanocine, or myoservin.

[0349] In some embodiments, a ligand attached to an iRNA as described herein acts as a pharmacokinetic modulator (PK modulator). PK modulators include lipophiles, bile acids, steroids, phospholipid analogues, peptides, protein binding agents, PEG, vitamins etc. Exemplary PK modulators include, but are not limited to, cholesterol, fatty acids, cholic acid, lithocholic acid, dialkylglycerides, diacylglyceride, phospholipids, sphingolipids, naproxen, ibuprofen, vitamin E, biotin etc. Oligonucleotides that comprise a number of phosphorothioate linkages are also known to bind to serum protein, thus short oligonucleotides, e.g., oligonucleotides of about 5 bases, 10 bases, 15 bases or 20 bases, comprising multiple of phosphorothioate linkages in the backbone are also amenable to the present invention as ligands (e.g. as PK modulating ligands). In addition, aptamers that bind serum components (e.g. serum proteins) are also suitable for use as PK modulating ligands in the embodiments described herein.

[0350] Ligand-conjugated oligonucleotides of the invention may be synthesized by the use of an oligonucleotide that bears a pendant reactive functionality, such as that derived from the attachment of a linking molecule onto the oligonucleotide (described below). This reactive oligonucleotide may be reacted directly with commercially-available ligands, ligands that are synthesized bearing any of a variety of protecting groups, or ligands that have a linking moiety attached thereto.

[0351] The oligonucleotides used in the conjugates of the present invention may be conveniently and routinely made through the well-known technique of solid-phase synthesis. Equipment for such synthesis is sold by several vendors including, for example, Applied Biosystems (Foster City, Calif.). Any other means for such synthesis known in the art may additionally or alternatively be employed. It is also known to use similar techniques to prepare other oligonucleotides, such as the phosphorothioates and alkylated derivatives.

[0352] In the ligand-conjugated oligonucleotides and ligand-molecule bearing sequence-specific linked nucleosides of the present invention, the oligonucleotides and oligonucleosides may be assembled on a suitable DNA synthesizer utilizing standard nucleotide or nucleoside precursors, or nucleotide or nucleoside conjugate precursors that already bear the linking moiety, ligand-nucleotide or nucleoside-conjugate precursors that already bear the ligand molecule, or non-nucleoside ligand-bearing building blocks.

[0353] When using nucleotide-conjugate precursors that already bear a linking moiety, the synthesis of the sequence-specific linked nucleosides is typically completed, and the ligand molecule is then reacted with the linking moiety to form the ligand-conjugated oligonucleotide. In some embodiments, the oligonucleotides or linked nucleosides of the present invention are synthesized by an automated synthesizer using phosphoramidites derived from ligand-nucleoside conjugates in addition to the standard phosphoramidites and non-standard phosphoramidites that are commercially available and routinely used in oligonucleotide synthesis.

### A. Lipid Conjugates

[0354] In one embodiment, the ligand or conjugate is a lipid or lipid-based molecule. Such a lipid or lipid-based molecule preferably binds a serum protein, e.g., human serum albumin (HSA). An HSA binding ligand allows for distribution of the conjugate to a target tissue, e.g., a non-kidney target tissue of the body. For example, the target tissue can be the liver, including parenchymal cells of the liver. Other molecules that can bind HSA can also be used as ligands. For example, naproxen or aspirin can be used. A lipid or lipid-based ligand can (a) increase resistance to degradation of the conjugate, (b) increase targeting or transport into a target cell or cell membrane, and/or (c) can be used to adjust binding to a serum protein, e.g., HSA.

[0355] A lipid based ligand can be used to inhibit, e.g., control the binding of the conjugate to a target tissue. For example, a lipid or lipid-based ligand that binds to HSA more strongly will be less likely to be targeted to the kidney and therefore less likely to be cleared from the body. A lipid or lipid-based ligand that binds to HSA less strongly can be used to target the conjugate to the kidney.

[0356] In a preferred embodiment, the lipid based ligand binds HSA. Preferably, it binds HSA with a sufficient affinity such that the conjugate will be preferably distributed to a non-kidney tissue. However, it is preferred that the affinity not be so strong that the HSA-ligand binding cannot be reversed.

[0357] In another preferred embodiment, the lipid based ligand binds HSA weakly or not at all, such that the conjugate will be preferably distributed to the kidney. Other moieties that target to kidney cells can also be used in place of or in addition to the lipid based ligand.

[0358] In another aspect, the ligand is a moiety, e.g., a vitamin, which is taken up by a target cell, e.g., a proliferating cell. These are particularly useful for treating disorders characterized by unwanted cell proliferation, e.g., of the malignant or non-malignant type, e.g., cancer cells.

[0359] Exemplary vitamins include vitamin A, E, and K. Other exemplary vitamins include are B vitamin, e.g., folic acid, B12, riboflavin, biotin, pyridoxal or other vitamins or nutrients taken up by target cells such as liver cells. Also included are HSA and low density lipoprotein (LDL).

### B. Cell Permeation Agents

[0360] In another aspect, the ligand is a cell-permeation agent, preferably a helical cell-permeation agent. Preferably, the agent is amphipathic. An exemplary agent is a peptide such as tat or antennopedia. If the agent is a peptide, it can be modified, including a peptidylmimetic, invertomers, non-peptide or pseudo-peptide linkages, and use of D-amino acids. The helical agent is preferably an alpha-helical agent, which preferably has a lipophilic and a lipophobic phase.

[0361] The ligand can be a peptide or peptidomimetic. A peptidomimetic (also referred to herein as an oligopeptidomimetic) is a molecule capable of folding into a defined three-dimensional structure similar to a natural peptide. The attachment of peptide and peptidomimetics to iRNA agents can affect pharmacokinetic distribution of the iRNA, such as by enhancing cellular recognition and absorption. The peptide or peptidomimetic moiety can be about 5-50 amino acids long, e.g., about 5, 10, 15, 20, 25, 30, 35, 40, 45, or 50 amino acids long.

[0362] A peptide or peptidomimetic can be, for example, a cell permeation peptide, cationic peptide, amphipathic peptide, or hydrophobic peptide (e.g., consisting primarily of Tyr, Trp or Phe). The peptide moiety can be a dendrimer peptide, constrained peptide or crosslinked peptide. In another alternative, the peptide moiety can include a hydrophobic membrane translocation sequence (MTS). An exemplary hydrophobic MTS-containing peptide is RFGF having the amino acid sequence AAVALLPAVLLALLAP (SEQ ID NO: 9). An RFGF analogue (e.g., amino acid sequence AALLPVLLAAP (SEQ ID NO: 10) containing a hydrophobic MTS can also be a targeting moiety. The peptide moiety can be a “delivery” peptide, which can carry large polar molecules including peptides, oligonucleotides, and protein across cell membranes. For example, sequences from the HIV Tat protein (GRKKRRQRRRPPQ (SEQ ID NO: 11) and the Drosophila Antennapedia protein (RQIKIWFQNRRMKWKK (SEQ ID NO: 12) have been found to be capable of functioning as delivery peptides. A peptide or peptidomimetic can be encoded by a random sequence of DNA, such as a peptide identified from a phage-display library, or one-bead-one-compound (OBOC) combinatorial library (Lam et al., Nature, 354:82-84, 1991). Examples of a peptide or peptidomimetic tethered to a dsRNA agent via an incorporated monomer unit for cell targeting purposes is an arginine-glycine-aspartic acid (RGD)-peptide, or RGD mimic. A peptide moiety can range in length from about 5 amino acids to about 40 amino acids. The peptide moieties can have a structural modification, such as to increase stability or direct conformational properties. Any of the structural modifications described below can be utilized.

[0363] An RGD peptide for use in the compositions and methods of the invention may be linear or cyclic, and may be modified, e.g., glycosylated or methylated, to facilitate targeting to a specific tissue(s). RGD-containing peptides and peptidiomimemtics may include D-amino acids, as well as synthetic RGD mimics. In addition to RGD, one can use other moieties that target the integrin ligand. Preferred conjugates of this ligand target PECAM-1 or VEGF.

[0364] A “cell permeation peptide” is capable of permeating a cell, e.g., a microbial cell, such as a bacterial or fungal cell, or a mammalian cell, such as a human cell. A microbial cell-permeating peptide can be, for example, a α-helical linear peptide (e.g., LL-37 or Ceropin P1), a disulfide bond-containing peptide (e.g., α-defensin, β-defensin or bactenecin), or a peptide containing only one or two dominating amino acids (e.g., PR-39 or indolicidin). A cell permeation peptide can also include a nuclear localization signal (NLS). For example, a cell permeation peptide can be a bipartite amphipathic peptide, such as MPG, which is derived from the fusion peptide domain of HIV-1 gp41 and the NLS of SV40 large T antigen (Simeoni et al., Nucl. Acids Res. 31:2717-2724, 2003).

### C. Carbohydrate Conjugates

[0365] In some embodiments of the compositions and methods of the invention, an iRNA oligonucleotide further comprises a carbohydrate. The carbohydrate conjugated iRNA are advantageous for the in vivo delivery of nucleic acids, as well as compositions suitable for in vivo therapeutic use, as described herein. As used herein, “carbohydrate” refers to a compound which is either a carbohydrate per se made up of one or more monosaccharide units having at least 6 carbon atoms (which can be linear, branched or cyclic) with an oxygen, nitrogen or sulfur atom bonded to each carbon atom; or a compound having as a part thereof a carbohydrate moiety made up of one or more monosaccharide units each having at least six carbon atoms (which can be linear, branched or cyclic), with an oxygen, nitrogen or sulfur atom bonded to each carbon atom. Representative carbohydrates include the sugars (mono-, di-, tri- and oligosaccharides containing from about 4, 5, 6, 7, 8, or 9 monosaccharide units), and polysaccharides such as starches, glycogen, cellulose and polysaccharide gums. Specific monosaccharides include C5 and above (e.g., C5, C6, C7, or C8) sugars; di- and trisaccharides include sugars having two or three monosaccharide units (e.g., C5, C6, C7, or C8).

[0366] In one embodiment, a carbohydrate conjugate for use in the compositions and methods of the invention is a monosaccharide. In another embodiment, a carbohydrate conjugate for use in the compositions and methods of the invention is selected from the group consisting of:

[chemical structure]

[chemical structure]

[chemical structure]

[chemical structure]

[chemical structure]

[0367] In one embodiment, the monosaccharide is an N-acetylgalactosamine, such as

[chemical structure]

[0368] Another representative carbohydrate conjugate for use in the embodiments described herein includes, but is not limited to,

[chemical structure]

[0369] (Formula XXIII), when one of X or Y is an oligonucleotide, the other is a hydrogen.

[0370] In certain embodiments of the invention, the GalNAc or GalNAc derivative is attached to an iRNA agent of the invention via a monovalent linker. In some embodiments, the GalNAc or GalNAc derivative is attached to an iRNA agent of the invention via a bivalent linker. In yet other embodiments of the invention, the GalNAc or GalNAc derivative is attached to an iRNA agent of the invention via a trivalent linker.

[0371] In one embodiment, the double stranded RNAi agents of the invention comprise one GalNAc or GalNAc derivative attached to the iRNA agent. In another embodiment, the double stranded RNAi agents of the invention comprise a plurality (e.g., 2, 3, 4, 5, or 6) GalNAc or GalNAc derivatives, each independently attached to a plurality of nucleotides of the double stranded RNAi agent through a plurality of monovalent linkers.

[0372] In some embodiments, for example, when the two strands of an iRNA agent of the invention are part of one larger molecule connected by an uninterrupted chain of nucleotides between the 3′-end of one strand and the 5′-end of the respective other strand forming a hairpin loop comprising, a plurality of unpaired nucleotides, each unpaired nucleotide within the hairpin loop may independently comprise a GalNAc or GalNAc derivative attached via a monovalent linker.

[0373] In some embodiments, the carbohydrate conjugate further comprises one or more additional ligands as described above, such as, but not limited to, a PK modulator and/or a cell permeation peptide.

### D. Linkers

[0374] In some embodiments, the conjugate or ligand described herein can be attached to an iRNA oligonucleotide with various linkers that can be cleavable or non-cleavable.

[0375] The term “linker” or “linking group” means an organic moiety that connects two parts of a compound, e.g., covalently attaches two parts of a compound. Linkers typically comprise a direct bond or an atom such as oxygen or sulfur, a unit such as NR8, C(O), C(O)NH, SO, SO₂, SO₂NH or a chain of atoms, such as, but not limited to, substituted or unsubstituted alkyl, substituted or unsubstituted alkenyl, substituted or unsubstituted alkynyl, arylalkyl, arylalkenyl, arylalkynyl, heteroarylalkyl, heteroarylalkenyl, heteroarylalkynyl, heterocyclylalkyl, heterocyclylalkenyl, heterocyclylalkynyl, aryl, heteroaryl, heterocyclyl, cycloalkyl, cycloalkenyl, alkylarylalkyl, alkylarylalkenyl, alkylarylalkynyl, alkenylarylalkyl, alkenylarylalkenyl, alkenylarylalkynyl, alkynylarylalkyl, alkynylarylalkenyl, alkynylarylalkynyl, alkylheteroarylalkyl, alkylheteroarylalkenyl, alkylheteroarylalkynyl, alkenylheteroarylalkyl, alkenylheteroarylalkenyl, alkenylheteroarylalkynyl, alkynylheteroarylalkyl, alkynylheteroarylalkenyl, alkynylheteroarylalkynyl, alkylheterocyclylalkyl, alkylheterocyclylalkenyl, alkylhererocyclylalkynyl, alkenylheterocyclylalkyl, alkenylheterocyclylalkenyl, alkenylheterocyclylalkynyl, alkynylheterocyclylalkyl, alkynylheterocyclylalkenyl, alkynylheterocyclylalkynyl, alkylaryl, alkenylaryl, alkynylaryl, alkylheteroaryl, alkenylheteroaryl, alkynylhereroaryl, which one or more methylenes can be interrupted or terminated by O, S, S(O), SO₂, N(R8), C(O), substituted or unsubstituted aryl, substituted or unsubstituted heteroaryl, substituted or unsubstituted heterocyclic; where R8 is hydrogen, acyl, aliphatic or substituted aliphatic. In one embodiment, the linker is between about 1-24 atoms, 2-24, 3-24, 4-24, 5-24, 6-24, 6-18, 7-18, 8-18 atoms, 7-17, 8-17, 6-16, 7-16, or 8-16 atoms.

[0376] A cleavable linking group is one which is sufficiently stable outside the cell, but which upon entry into a target cell is cleaved to release the two parts the linker is holding together. In a preferred embodiment, the cleavable linking group is cleaved at least about 10 times, 20, times, 30 times, 40 times, 50 times, 60 times, 70 times, 80 times, 90 times or more, or at least about 100 times faster in a target cell or under a first reference condition (which can, e.g., be selected to mimic or represent intracellular conditions) than in the blood of a subject, or under a second reference condition (which can, e.g., be selected to mimic or represent conditions found in the blood or serum).

[0377] Cleavable linking groups are susceptible to cleavage agents, e.g., pH, redox potential or the presence of degradative molecules. Generally, cleavage agents are more prevalent or found at higher levels or activities inside cells than in serum or blood. Examples of such degradative agents include: redox agents which are selected for particular substrates or which have no substrate specificity, including, e.g., oxidative or reductive enzymes or reductive agents such as mercaptans, present in cells, that can degrade a redox cleavable linking group by reduction; esterases; endosomes or agents that can create an acidic environment, e.g., those that result in a pH of five or lower; enzymes that can hydrolyze or degrade an acid cleavable linking group by acting as a general acid, peptidases (which can be substrate specific), and phosphatases.

[0378] A cleavable linkage group, such as a disulfide bond can be susceptible to pH. The pH of human serum is 7.4, while the average intracellular pH is slightly lower, ranging from about 7.1-7.3. Endosomes have a more acidic pH, in the range of 5.5-6.0, and lysosomes have an even more acidic pH at around 5.0. Some linkers will have a cleavable linking group that is cleaved at a preferred pH, thereby releasing a cationic lipid from the ligand inside the cell, or into the desired compartment of the cell.

[0379] A linker can include a cleavable linking group that is cleavable by a particular enzyme. The type of cleavable linking group incorporated into a linker can depend on the cell to be targeted. For example, a liver-targeting ligand can be linked to a cationic lipid through a linker that includes an ester group. Liver cells are rich in esterases, and therefore the linker will be cleaved more efficiently in liver cells than in cell types that are not esterase-rich. Other cell-types rich in esterases include cells of the lung, renal cortex, and testis.

[0380] Linkers that contain peptide bonds can be used when targeting cell types rich in peptidases, such as liver cells and synoviocytes.

[0381] In general, the suitability of a candidate cleavable linking group can be evaluated by testing the ability of a degradative agent (or condition) to cleave the candidate linking group. It will also be desirable to also test the candidate cleavable linking group for the ability to resist cleavage in the blood or when in contact with other non-target tissue. Thus, one can determine the relative susceptibility to cleavage between a first and a second condition, where the first is selected to be indicative of cleavage in a target cell and the second is selected to be indicative of cleavage in other tissues or biological fluids, e.g., blood or serum. The evaluations can be carried out in cell free systems, in cells, in cell culture, in organ or tissue culture, or in whole animals. It can be useful to make initial evaluations in cell-free or culture conditions and to confirm by further evaluations in whole animals. In preferred embodiments, useful candidate compounds are cleaved at least about 2, 4, 10, 20, 30, 40, 50, 60, 70, 80, 90, or about 100 times faster in the cell (or under in vitro conditions selected to mimic intracellular conditions) as compared to blood or serum (or under in vitro conditions selected to mimic extracellular conditions).

i. Redox Cleavable Linking Groups

[0382] In one embodiment, a cleavable linking group is a redox cleavable linking group that is cleaved upon reduction or oxidation. An example of reductively cleavable linking group is a disulphide linking group (—S—S—). To determine if a candidate cleavable linking group is a suitable “reductively cleavable linking group,” or for example is suitable for use with a particular iRNA moiety and particular targeting agent one can look to methods described herein. For example, a candidate can be evaluated by incubation with dithiothreitol (DTT), or other reducing agent using reagents know in the art, which mimic the rate of cleavage which would be observed in a cell, e.g., a target cell. The candidates can also be evaluated under conditions which are selected to mimic blood or serum conditions. In one, candidate compounds are cleaved by at most about 10% in the blood. In other embodiments, useful candidate compounds are degraded at least about 2, 4, 10, 20, 30, 40, 50, 60, 70, 80, 90, or about 100 times faster in the cell (or under in vitro conditions selected to mimic intracellular conditions) as compared to blood (or under in vitro conditions selected to mimic extracellular conditions). The rate of cleavage of candidate compounds can be determined using standard enzyme kinetics assays under conditions chosen to mimic intracellular media and compared to conditions chosen to mimic extracellular media.

ii. Phosphate-Based Cleavable Linking Groups

[0383] In another embodiment, a cleavable linker comprises a phosphate-based cleavable linking group. A phosphate-based cleavable linking group is cleaved by agents that degrade or hydrolyze the phosphate group. An example of an agent that cleaves phosphate groups in cells are enzymes such as phosphatases in cells. Examples of phosphate-based linking groups are —O—P(O)(ORk)—O—, —O—P(S)(ORk)—O—, —O—P(S)(SRk)—O—, —S—P(O)(ORk)—O—, —O—P(O)(ORk)—S—, —S—P(O)(ORk)—S—, —O—P(S)(ORk)—S—, —S—P(S)(ORk)—O—, —O—P(O)(Rk)—O—, —O—P(S)(Rk)—O—, —S—P(O)(Rk)—O—, —S—P(S)(Rk)—O—, —S—P(O)(Rk)—S—, —O—P(S)(Rk)—S—. Preferred embodiments are —O—P(O)(OH)—O—, —O—P(S)(OH)—O—, —O—P(S)(SH)—O—, —S—P(O)(OH)—O—, —O—P(O)(OH)—S—, —S—P(O)(OH)—S—, —O—P(S)(OH)—S—, —S—P(S)(OH)—O—, —O—P(O)(H)—O—, —O—P(S)(H)—O—, —S—P(O)(H)—O, —S—P(S)(H)—O—, —S—P(O)(H)—S—, —O—P(S)(H)—S—. A preferred embodiment is-O—P(O)(OH)—O—. These candidates can be evaluated using methods analogous to those described above.

iii. Acid Cleavable Linking Groups

[0384] In another embodiment, a cleavable linker comprises an acid cleavable linking group. An acid cleavable linking group is a linking group that is cleaved under acidic conditions. In preferred embodiments acid cleavable linking groups are cleaved in an acidic environment with a pH of about 6.5 or lower (e.g., about 6.0, 5.75, 5.5, 5.25, 5.0, or lower), or by agents such as enzymes that can act as a general acid. In a cell, specific low pH organelles, such as endosomes and lysosomes can provide a cleaving environment for acid cleavable linking groups. Examples of acid cleavable linking groups include but are not limited to hydrazones, esters, and esters of amino acids. Acid cleavable groups can have the general formula —C═NN—, C(O)O, or —OC(O). A preferred embodiment is when the carbon attached to the oxygen of the ester (the alkoxy group) is an aryl group, substituted alkyl group, or tertiary alkyl group such as dimethyl pentyl or t-butyl. These candidates can be evaluated using methods analogous to those described above.

iv. Ester-Based Linking Groups

[0385] In another embodiment, a cleavable linker comprises an ester-based cleavable linking group. An ester-based cleavable linking group is cleaved by enzymes such as esterases and amidases in cells. Examples of ester-based cleavable linking groups include but are not limited to esters of alkylene, alkenylene and alkynylene groups. Ester cleavable linking groups have the general formula —C(O)O—, or —OC(O)—. These candidates can be evaluated using methods analogous to those described above.

v. Peptide-Based Cleaving Groups

[0386] In yet another embodiment, a cleavable linker comprises a peptide-based cleavable linking group. A peptide-based cleavable linking group is cleaved by enzymes such as peptidases and proteases in cells. Peptide-based cleavable linking groups are peptide bonds formed between amino acids to yield oligopeptides (e.g., dipeptides, tripeptides etc.) and polypeptides. Peptide-based cleavable groups do not include the amide group (—C(O)NH—). The amide group can be formed between any alkylene, alkenylene or alkynelene. A peptide bond is a special type of amide bond formed between amino acids to yield peptides and proteins. The peptide based cleavage group is generally limited to the peptide bond (i.e., the amide bond) formed between amino acids yielding peptides and proteins and does not include the entire amide functional group. Peptide-based cleavable linking groups have the general formula —NHCHRAC(O)NHCHRBC(O)—, where RA and RB are the R groups of the two adjacent amino acids. These candidates can be evaluated using methods analogous to those described above.

[0387] In one embodiment, an iRNA of the invention is conjugated to a carbohydrate through a linker. Non-limiting examples of iRNA carbohydrate conjugates with linkers of the compositions and methods of the invention include, but are not limited to,

[chemical structure]

[chemical structure]

[chemical structure]

[chemical structure]

when one of X or Y is an oligonucleotide, the other is a hydrogen.

[0388] In certain embodiments of the compositions and methods of the invention, a ligand is one or more GalNAc (N-acetylgalactosamine) derivatives attached through a bivalent or trivalent branched linker.

[0389] In one embodiment, a dsRNA of the invention is conjugated to a bivalent or trivalent branched linker selected from the group of structures shown in any of formula (XXXII)—(XXXV):

[chemical structure]

[0390] wherein:
[0391] q2A, q2B, q3A, q3B, q4A, q4B, q5A, q5B and q5C represent independently for each occurrence 0-20 and wherein the repeating unit can be the same or different;
[0392] P^{2A}, P^{2B}, P^{3A}, P^{3B}, P^{4A}, P^{4B}, P^{5A}, P^{5B}, P^{5C}, T^{2A}, T^{2B}, T^{3A}, T^{3B}, T^{4A}, T^{4B}, T^{4A}, T^{5B}, T^{5C} are each independently for each occurrence absent, CO, NH, O, S, OC(O), NHC(O), CH₂, CH₂NH or CH₂O; Q^{2A}, Q^{2B}, Q^{3A}, Q^{3B}, Q^{4A}, Q^{4B}, Q^{5A}, Q^{5B}, Q^{5C} are independently for each occurrence absent, alkylene, substituted alkylene wherein one or more methylenes can be interrupted or terminated by one or more of O, S, S(O), SO₂, N(RN), C(R′)═C(R″), C═C or C(O); R^{2A}, R^{2B}, R^{3A}, R^{3B}, R^{4A}, R^{4B}, R^{5A}, R^{5B}, R^{5C} are each independently for each occurrence absent, NH, O, S, CH₂, C(O)O, C(O)NH, NHCH(R^{a})C(O), —C(O)—CH(R^{a})—NH—, CO, CH═N—O,

[chemical structure]

or heterocyclyl;
[0393] L^{2A}, L^{2B}, L^{3A}, L^{3B}, L^{4A}, L^{4B}, L^{5A}, L^{5B} and L^{5C} represent the ligand; i.e. each independently for each occurrence a monosaccharide (such as GalNAc), disaccharide, trisaccharide, tetrasaccharide, oligosaccharide, or polysaccharide; and R^{a} is H or amino acid side chain. Trivalent conjugating GalNAc derivatives are particularly useful for use with RNAi agents for inhibiting the expression of a target gene, such as those of formula (XXXVI):

[chemical structure]

[0394] wherein L^{5A}, L^{5B} and L^{5C} represent a monosaccharide, such as GalNAc derivative.

[0395] Examples of suitable bivalent and trivalent branched linker groups conjugating GalNAc derivatives include, but are not limited to, the structures recited above as formulas II, VII, XI, X, and XIII.

[0396] Representative U.S. patents that teach the preparation of RNA conjugates include, but are not limited to, U.S. Pat. Nos. 4,828,979; 4,948,882; 5,218,105; 5,525,465; 5,541,313; 5,545,730; 5,552,538; 5,578,717, 5,580,731; 5,591,584; 5,109,124; 5,118,802; 5,138,045; 5,414,077; 5,486,603; 5,512,439; 5,578,718; 5,608,046; 4,587,044; 4,605,735; 4,667,025; 4,762,779; 4,789,737; 4,824,941; 4,835,263; 4,876,335; 4,904,582; 4,958,013; 5,082,830; 5,112,963; 5,214,136; 5,082,830; 5,112,963; 5,214,136; 5,245,022; 5,254,469; 5,258,506; 5,262,536; 5,272,250; 5,292,873; 5,317,098; 5,371,241, 5,391,723; 5,416,203, 5,451,463; 5,510,475; 5,512,667; 5,514,785; 5,565,552; 5,567,810; 5,574,142; 5,585,481; 5,587,371; 5,595,726; 5,597,696; 5,599,923; 5,599,928 and 5,688,941; 6,294,664; 6,320,017; 6,576,752; 6,783,931; 6,900,297; 7,037,646; 8,106,022, the entire contents of each of which are hereby incorporated herein by reference.

[0397] It is not necessary for all positions in a given compound to be uniformly modified, and in fact more than one of the aforementioned modifications can be incorporated in a single compound or even at a single nucleoside within an iRNA. The present invention also includes iRNA compounds that are chimeric compounds.

[0398] “Chimeric” iRNA compounds or “chimeras,” in the context of this invention, are iRNA compounds, preferably dsRNAs, which contain two or more chemically distinct regions, each made up of at least one monomer unit, i.e., a nucleotide in the case of a dsRNA compound. These iRNAs typically contain at least one region wherein the RNA is modified so as to confer upon the iRNA increased resistance to nuclease degradation, increased cellular uptake, and/or increased binding affinity for the target nucleic acid. An additional region of the iRNA can serve as a substrate for enzymes capable of cleaving RNA:DNA or RNA:RNA hybrids. By way of example, RNase H is a cellular endonuclease which cleaves the RNA strand of an RNA:DNA duplex. Activation of RNase H, therefore, results in cleavage of the RNA target, thereby greatly enhancing the efficiency of iRNA inhibition of gene expression. Consequently, comparable results can often be obtained with shorter iRNAs when chimeric dsRNAs are used, compared to phosphorothioate deoxy dsRNAs hybridizing to the same target region. Cleavage of the RNA target can be routinely detected by gel electrophoresis and, if necessary, associated nucleic acid hybridization techniques known in the art.

[0399] In certain instances, the RNA of an iRNA can be modified by a non-ligand group. A number of non-ligand molecules have been conjugated to iRNAs in order to enhance the activity, cellular distribution or cellular uptake of the iRNA, and procedures for performing such conjugations are available in the scientific literature. Such non-ligand moieties have included lipid moieties, such as cholesterol (Kubo, T. et al., Biochem. Biophys. Res. Comm., 2007, 365(1):54-61; Letsinger et al., Proc. Natl. Acad. Sci. USA, 1989, 86:6553), cholic acid (Manoharan et al., Bioorg. Med. Chem. Lett., 1994, 4:1053), a thioether, e.g., hexyl-S-tritylthiol (Manoharan et al., Ann. N.Y. Acad. Sci., 1992, 660:306; Manoharan et al., Bioorg. Med. Chem. Let., 1993, 3:2765), a thiocholesterol (Oberhauser et al., Nucl. Acids Res., 1992, 20:533), an aliphatic chain, e.g., dodecandiol or undecyl residues (Saison-Behmoaras et al., EMBO J., 1991, 10:111; Kabanov et al., FEBS Lett., 1990, 259:327; Svinarchuk et al., Biochimie, 1993, 75:49), a phospholipid, e.g., di-hexadecyl-rac-glycerol or triethylammonium 1,2-di-O-hexadecyl-rac-glycero-3-H-phosphonate (Manoharan et al., Tetrahedron Lett., 1995, 36:3651; Shea et al., Nucl. Acids Res., 1990, 18:3777), a polyamine or a polyethylene glycol chain (Manoharan et al., Nucleosides & Nucleotides, 1995, 14:969), or adamantane acetic acid (Manoharan et al., Tetrahedron Lett., 1995, 36:3651), a palmityl moiety (Mishra et al., Biochim. Biophys. Acta, 1995, 1264:229), or an octadecylamine or hexylamino-carbonyl-oxycholesterol moiety (Crooke et al., J. Pharmacol. Exp. Ther., 1996, 277:923). Representative United States patents that teach the preparation of such RNA conjugates have been listed above. Typical conjugation protocols involve the synthesis of an RNAs bearing an aminolinker at one or more positions of the sequence. The amino group is then reacted with the molecule being conjugated using appropriate coupling or activating reagents. The conjugation reaction can be performed either with the RNA still bound to the solid support or following cleavage of the RNA, in solution phase. Purification of the RNA conjugate by HPLC typically affords the pure conjugate.

IV. Delivery of an iRNA of the Invention

[0400] The delivery of an iRNA of the invention to a cell e.g., a cell within a subject, such as a human subject (e.g., a subject in need thereof, such as a subject having a complement component C5-associated disease) can be achieved in a number of different ways. For example, delivery may be performed by contacting a cell with an iRNA of the invention either in vitro or in vivo. In vivo delivery may also be performed directly by administering a composition comprising an iRNA, e.g., a dsRNA, to a subject. Alternatively, in vivo delivery may be performed indirectly by administering one or more vectors that encode and direct the expression of the iRNA. These alternatives are discussed further below.

[0401] In general, any method of delivering a nucleic acid molecule (in vitro or in vivo) can be adapted for use with an iRNA of the invention (see e.g., Akhtar S. and Julian R L. (1992) Trends Cell. Biol. 2(5): 139-144 and WO94/02595, which are incorporated herein by reference in their entireties). For in vivo delivery, factors to consider in order to deliver an iRNA molecule include, for example, biological stability of the delivered molecule, prevention of non-specific effects, and accumulation of the delivered molecule in the target tissue. The non-specific effects of an iRNA can be minimized by local administration, for example, by direct injection or implantation into a tissue or topically administering the preparation. Local administration to a treatment site maximizes local concentration of the agent, limits the exposure of the agent to systemic tissues that can otherwise be harmed by the agent or that can degrade the agent, and permits a lower total dose of the iRNA molecule to be administered. Several studies have shown successful knockdown of gene products when an iRNA is administered locally. For example, intraocular delivery of a VEGF dsRNA by intravitreal injection in cynomolgus monkeys (Tolentino, M J., et al (2004) Retina 24:132-138) and subretinal injections in mice (Reich, S J., et al (2003) Mol. Vis. 9:210-216) were both shown to prevent neovascularization in an experimental model of age-related macular degeneration. In addition, direct intratumoral injection of a dsRNA in mice reduces tumor volume (Pille, J., et al (2005) Mol. Ther.11:267-274) and can prolong survival of tumor-bearing mice (Kim, W J., et al (2006) Mol. Ther. 14:343-350; Li, S., et al (2007) Mol. Ther. 15:515-523). RNA interference has also shown success with local delivery to the CNS by direct injection (Dorn, G., et al. (2004) Nucleic Acids 32:e49; Tan, P H., et al (2005) Gene Ther. 12:59-66; Makimura, H., et al (2002) BMC Neurosci. 3:18; Shishkina, G T., et al (2004) Neuroscience 129:521-528; Thakker, E R., et al (2004) Proc. Natl. Acad. Sci. U.S.A. 101:17270-17275; Akaneya, Y., et al (2005) J. Neurophysiol. 93:594-602) and to the lungs by intranasal administration (Howard, K A., et al (2006) Mol. Ther. 14:476-484; Zhang, X., et al (2004) J. Biol. Chem. 279: 10677-10684; Bitko, V., et al (2005) Nat. Med. 11:50-55). For administering an iRNA systemically for the treatment of a disease, the RNA can be modified or alternatively delivered using a drug delivery system; both methods act to prevent the rapid degradation of the dsRNA by endo- and exo-nucleases in vivo. Modification of the RNA or the pharmaceutical carrier can also permit targeting of the iRNA composition to the target tissue and avoid undesirable off-target effects. iRNA molecules can be modified by chemical conjugation to lipophilic groups such as cholesterol to enhance cellular uptake and prevent degradation. For example, an iRNA directed against ApoB conjugated to a lipophilic cholesterol moiety was injected systemically into mice and resulted in knockdown of apoB mRNA in both the liver and jejunum (Soutschek, J., et al (2004) Nature 432:173-178). Conjugation of an iRNA to an aptamer has been shown to inhibit tumor growth and mediate tumor regression in a mouse model of prostate cancer (McNamara, J O., et al (2006) Nat. Biotechnol. 24:1005-1015). In an alternative embodiment, the iRNA can be delivered using drug delivery systems such as a nanoparticle, a dendrimer, a polymer, liposomes, or a cationic delivery system. Positively charged cationic delivery systems facilitate binding of an iRNA molecule (negatively charged) and also enhance interactions at the negatively charged cell membrane to permit efficient uptake of an iRNA by the cell. Cationic lipids, dendrimers, or polymers can either be bound to an iRNA, or induced to form a vesicle or micelle (see e.g., Kim S H., et al (2008) Journal of Controlled Release 129(2): 107-116) that encases an iRNA. The formation of vesicles or micelles further prevents degradation of the iRNA when administered systemically. Methods for making and administering cationic-iRNA complexes are well within the abilities of one skilled in the art (see e.g., Sorensen, D R., et al (2003) J. Mol. Biol 327:761-766; Verma, U N., et al (2003) Clin. Cancer Res. 9:1291-1300; Arnold, A S et al (2007) J. Hypertens. 25:197-205, which are incorporated herein by reference in their entirety). Some non-limiting examples of drug delivery systems useful for systemic delivery of iRNAs include DOTAP (Sorensen, D R., et al (2003), supra; Verma, U N., et al (2003), supra), Oligofectamine, “solid nucleic acid lipid particles” (Zimmermann, T S., et al (2006) Nature 441:111-114), cardiolipin (Chien, P Y., et al (2005) Cancer Gene Ther. 12:321-328; Pal, A., et al (2005) Int J. Oncol. 26:1087-1091), polyethyleneimine (Bonnet M E., et al (2008) Pharm. Res. August 16 Epub ahead of print; Aigner, A. (2006) J. Biomed. Biotechnol. 71659), Arg-Gly-Asp (RGD) peptides (Liu, S. (2006) Mol. Pharm. 3:472-487), and polyamidoamines (Tomalia, D A., et al (2007) Biochem. Soc. Trans. 35:61-67; Yoo, H., et al (1999) Pharm. Res. 16:1799-1804). In some embodiments, an iRNA forms a complex with cyclodextrin for systemic administration. Methods for administration and pharmaceutical compositions of iRNAs and cyclodextrins can be found in U.S. Pat. No. 7,427,605, which is herein incorporated by reference in its entirety.

A. Vector Encoded iRNAs of the Invention

[0402] iRNA targeting the C5 gene can be expressed from transcription units inserted into DNA or RNA vectors (see, e.g., Couture, A, et al., TIG. (1996), 12:5-10; Skillern, A., et al., International PCT Publication No. WO 00/22113, Conrad, International PCT Publication No. WO 00/22114, and Conrad, U.S. Pat. No. 6,054,299). Expression can be transient (on the order of hours to weeks) or sustained (weeks to months or longer), depending upon the specific construct used and the target tissue or cell type. These transgenes can be introduced as a linear construct, a circular plasmid, or a viral vector, which can be an integrating or non-integrating vector. The transgene can also be constructed to permit it to be inherited as an extrachromosomal plasmid (Gassmann, et al., Proc. Natl. Acad. Sci. USA (1995) 92:1292).

[0403] The individual strand or strands of an iRNA can be transcribed from a promoter on an expression vector. Where two separate strands are to be expressed to generate, for example, a dsRNA, two separate expression vectors can be co-introduced (e.g., by transfection or infection) into a target cell. Alternatively each individual strand of a dsRNA can be transcribed by promoters both of which are located on the same expression plasmid. In one embodiment, a dsRNA is expressed as inverted repeat polynucleotides joined by a linker polynucleotide sequence such that the dsRNA has a stem and loop structure.

[0404] iRNA expression vectors are generally DNA plasmids or viral vectors. Expression vectors compatible with eukaryotic cells, preferably those compatible with vertebrate cells, can be used to produce recombinant constructs for the expression of an iRNA as described herein. Eukaryotic cell expression vectors are well known in the art and are available from a number of commercial sources. Typically, such vectors are provided containing convenient restriction sites for insertion of the desired nucleic acid segment. Delivery of iRNA expressing vectors can be systemic, such as by intravenous or intramuscular administration, by administration to target cells ex-planted from the patient followed by reintroduction into the patient, or by any other means that allows for introduction into a desired target cell.

[0405] iRNA expression plasmids can be transfected into target cells as a complex with cationic lipid carriers (e.g., Oligofectamine) or non-cationic lipid-based carriers (e.g., Transit-TKO™). Multiple lipid transfections for iRNA-mediated knockdowns targeting different regions of a target RNA over a period of a week or more are also contemplated by the invention. Successful introduction of vectors into host cells can be monitored using various known methods. For example, transient transfection can be signaled with a reporter, such as a fluorescent marker, such as Green Fluorescent Protein (GFP). Stable transfection of cells ex vivo can be ensured using markers that provide the transfected cell with resistance to specific environmental factors (e.g., antibiotics and drugs), such as hygromycin B resistance.

[0406] Viral vector systems which can be utilized with the methods and compositions described herein include, but are not limited to, (a) adenovirus vectors; (b) retrovirus vectors, including but not limited to lentiviral vectors, moloney murine leukemia virus, etc.; (c) adeno-associated virus vectors; (d) herpes simplex virus vectors; (e) SV 40 vectors; (f) polyoma virus vectors; (g) papilloma virus vectors; (h) picornavirus vectors; (i) pox virus vectors such as an orthopox, e.g., vaccinia virus vectors or avipox, e.g, canary pox or fowl pox; and (j) a helper-dependent or gutless adenovirus. Replication-defective viruses can also be advantageous. Different vectors will or will not become incorporated into the cells' genome. The constructs can include viral sequences for transfection, if desired. Alternatively, the construct can be incorporated into vectors capable of episomal replication, e.g. EPV and EBV vectors. Constructs for the recombinant expression of an iRNA will generally require regulatory elements, e.g., promoters, enhancers, etc., to ensure the expression of the iRNA in target cells. Other aspects to consider for vectors and constructs are further described below.

[0407] Vectors useful for the delivery of an iRNA will include regulatory elements (promoter, enhancer, etc.) sufficient for expression of the iRNA in the desired target cell or tissue. The regulatory elements can be chosen to provide either constitutive or regulated/inducible expression.

[0408] Expression of the iRNA can be precisely regulated, for example, by using an inducible regulatory sequence that is sensitive to certain physiological regulators, e.g., circulating glucose levels, or hormones (Docherty et al., 1994, FASEB J. 8:20-24). Such inducible expression systems, suitable for the control of dsRNA expression in cells or in mammals include, for example, regulation by ecdysone, by estrogen, progesterone, tetracycline, chemical inducers of dimerization, and isopropyl-beta-DI-thiogalactopyranoside (IPTG). A person skilled in the art would be able to choose the appropriate regulatory/promoter sequence based on the intended use of the iRNA transgene.

[0409] Viral vectors that contain nucleic acid sequences encoding an iRNA can be used. For example, a retroviral vector can be used (see Miller et al., Meth. Enzymol. 217:581-599 (1993)). These retroviral vectors contain the components necessary for the correct packaging of the viral genome and integration into the host cell DNA. The nucleic acid sequences encoding an iRNA are cloned into one or more vectors, which facilitate delivery of the nucleic acid into a patient. More detail about retroviral vectors can be found, for example, in Boesen et al., Biotherapy 6:291-302 (1994), which describes the use of a retroviral vector to deliver the mdrl gene to hematopoietic stem cells in order to make the stem cells more resistant to chemotherapy. Other references illustrating the use of retroviral vectors in gene therapy are: Clowes et al., J. Clin. Invest. 93:644-651 (1994); Kiem et al., Blood 83: 1467-1473 (1994); Salmons and Gunzberg, Human Gene Therapy 4:129-141 (1993); and Grossman and Wilson, Curr. Opin. in Genetics and Devel. 3:110-114 (1993). Lentiviral vectors contemplated for use include, for example, the HIV based vectors described in U.S. Pat. Nos. 6,143,520; 5,665,557; and 5,981,276, which are herein incorporated by reference.

[0410] Adenoviruses are also contemplated for use in delivery of iRNAs of the invention. Adenoviruses are especially attractive vehicles, e.g., for delivering genes to respiratory epithelia. Adenoviruses naturally infect respiratory epithelia where they cause a mild disease. Other targets for adenovirus-based delivery systems are liver, the central nervous system, endothelial cells, and muscle. Adenoviruses have the advantage of being capable of infecting non-dividing cells. Kozarsky and Wilson, Current Opinion in Genetics and Development 3:499-503 (1993) present a review of adenovirus-based gene therapy. Bout et al., Human Gene Therapy 5:3-10 (1994) demonstrated the use of adenovirus vectors to transfer genes to the respiratory epithelia of rhesus monkeys. Other instances of the use of adenoviruses in gene therapy can be found in Rosenfeld et al., Science 252:431-434 (1991); Rosenfeld et al., Cell 68:143-155 (1992); Mastrangeli et al., J. Clin. Invest. 91:225-234 (1993); PCT Publication WO94/12649; and Wang, et al., Gene Therapy 2:775-783 (1995). A suitable AV vector for expressing an iRNA featured in the invention, a method for constructing the recombinant AV vector, and a method for delivering the vector into target cells, are described in Xia H et al. (2002), Nat. Biotech. 20: 1006-1010.

[0411] Adeno-associated virus (AAV) vectors may also be used to delivery an iRNA of the invention (Walsh et al., Proc. Soc. Exp. Biol. Med. 204:289-300 (1993); U.S. Pat. No. 5,436,146). In one embodiment, the iRNA can be expressed as two separate, complementary single-stranded RNA molecules from a recombinant AAV vector having, for example, either the U6 or H1 RNA promoters, or the cytomegalovirus (CMV) promoter. Suitable AAV vectors for expressing the dsRNA featured in the invention, methods for constructing the recombinant AV vector, and methods for delivering the vectors into target cells are described in Samulski R et al. (1987), J. Virol. 61: 3096-3101; Fisher K J et al. (1996), J. Virol, 70: 520-532; Samulski R et al. (1989), J. Virol. 63: 3822-3826; U.S. Pat. Nos. 5,252,479; 5,139,941; International Patent Application No. WO 94/13788; and International Patent Application No. WO 93/24641, the entire disclosures of which are herein incorporated by reference.

[0412] Another viral vector suitable for delivery of an iRNA of the invention is a pox virus such as a vaccinia virus, for example an attenuated vaccinia such as Modified Virus Ankara (MVA) or NYVAC, an avipox such as fowl pox or canary pox.

[0413] The tropism of viral vectors can be modified by pseudotyping the vectors with envelope proteins or other surface antigens from other viruses, or by substituting different viral capsid proteins, as appropriate. For example, lentiviral vectors can be pseudotyped with surface proteins from vesicular stomatitis virus (VSV), rabies, Ebola, Mokola, and the like. AAV vectors can be made to target different cells by engineering the vectors to express different capsid protein serotypes; see, e.g., Rabinowitz J E et al. (2002), J Virol 76:791-801, the entire disclosure of which is herein incorporated by reference.

[0414] The pharmaceutical preparation of a vector can include the vector in an acceptable diluent, or can include a slow release matrix in which the gene delivery vehicle is imbedded. Alternatively, where the complete gene delivery vector can be produced intact from recombinant cells, e.g., retroviral vectors, the pharmaceutical preparation can include one or more cells which produce the gene delivery system.

### V. Pharmaceutical Compositions of the Invention

[0415] The present invention also includes pharmaceutical compositions and formulations which include the iRNAs of the invention. In one embodiment, provided herein are pharmaceutical compositions containing an iRNA, as described herein, and a pharmaceutically acceptable carrier.

[0416] The phrase “pharmaceutically acceptable” is employed herein to refer to those compounds, materials, compositions, and/or dosage forms which are, within the scope of sound medical judgment, suitable for use in contact with the tissues of human subjects and animal subjects without excessive toxicity, irritation, allergic response, or other problem or complication, commensurate with a reasonable benefit/risk ratio.

[0417] The phrase “pharmaceutically-acceptable carrier” as used herein means a pharmaceutically-acceptable material, composition or vehicle, such as a liquid or solid filler, diluent, excipient, manufacturing aid (e.g., lubricant, talc magnesium, calcium or zinc stearate, or steric acid), or solvent encapsulating material, involved in carrying or transporting the subject compound from one organ, or portion of the body, to another organ, or portion of the body. Each carrier must be “acceptable” in the sense of being compatible with the other ingredients of the formulation and not injurious to the subject being treated. Some examples of materials which can serve as pharmaceutically-acceptable carriers include: (1) sugars, such as lactose, glucose and sucrose; (2) starches, such as corn starch and potato starch; (3) cellulose, and its derivatives, such as sodium carboxymethyl cellulose, ethyl cellulose and cellulose acetate; (4) powdered tragacanth; (5) malt; (6) gelatin; (7) lubricating agents, such as magnesium state, sodium lauryl sulfate and talc; (8) excipients, such as cocoa butter and suppository waxes; (9) oils, such as peanut oil, cottonseed oil, safflower oil, sesame oil, olive oil, corn oil and soybean oil; (10) glycols, such as propylene glycol; (11) polyols, such as glycerin, sorbitol, mannitol and polyethylene glycol; (12) esters, such as ethyl oleate and ethyl laurate; (13) agar; (14) buffering agents, such as magnesium hydroxide and aluminum hydroxide; (15) alginic acid; (16) pyrogen-free water; (17) isotonic saline; (18) Ringer's solution; (19) ethyl alcohol; (20) pH buffered solutions; (21) polyesters, polycarbonates and/or polyanhydrides; (22) bulking agents, such as polypeptides and amino acids (23) serum component, such as serum albumin, HDL and LDL; and (22) other non-toxic compatible substances employed in pharmaceutical formulations.

[0418] The pharmaceutical compositions containing the iRNA are useful for treating a disease or disorder associated with the expression or activity of a C5 gene, e.g. a complement component C5-associated disease. Such pharmaceutical compositions are formulated based on the mode of delivery. One example is compositions that are formulated for systemic administration via parenteral delivery, e.g., by subcutaneous (SC) or intravenous (IV) delivery. Another example is compositions that are formulated for direct delivery into the brain parenchyma, e.g., by infusion into the brain, such as by continuous pump infusion. The pharmaceutical compositions of the invention may be administered in dosages sufficient to inhibit expression of a C5 gene.

[0419] In one embodiment, an iRNA agent of the invention is administered to a subject as a weight-based dose. A “weight-based dose” (e.g., a dose in mg/kg) is a dose of the iRNA agent that will change depending on the subject's weight. In another embodiment, an iRNA agent is administered to a subject as a fixed dose. A “fixed dose” (e.g., a dose in mg) means that one dose of an iRNA agent is used for all subjects regardless of any specific subject-related factors, such as weight. In one particular embodiment, a fixed dose of an iRNA agent of the invention is based on a predetermined weight or age.

[0420] In general, a suitable dose of an iRNA of the invention will be in the range of about 0.001 to about 200.0 milligrams per kilogram body weight of the recipient per day, generally in the range of about 1 to 50 mg per kilogram body weight per day. For example, the dsRNA can be administered at about 0.01 mg/kg, about 0.05 mg/kg, about 0.5 mg/kg, about 1 mg/kg, about 1.5 mg/kg, about 2 mg/kg, about 3 mg/kg, about 10 mg/kg, about 20 mg/kg, about 30 mg/kg, about 40 mg/kg, or about 50 mg/kg per single dose.

[0421] For example, the dsRNA may be administered at a dose of about 0.1, 0.2, 0.3, 0.4, 0.5, 0.6, 0.7, 0.8, 0.9, 1, 1.1, 1.2, 1.3, 1.4, 1.5, 1.6, 1.7, 1.8, 1.9, 2, 2.1, 2.2, 2.3, 2.4, 2.5, 2.6, 2.7, 2.8, 2.9, 3, 3.1, 3.2, 3.3, 3.4, 3.5, 3.6, 3.7, 3.8, 3.9, 4, 4.1, 4.2, 4.3, 4.4, 4.5, 4.6, 4.7, 4.8, 4.9, 5, 5.1, 5.2, 5.3, 5.4, 5.5, 5.6, 5.7, 5.8, 5.9, 6, 6.1, 6.2, 6.3, 6.4, 6.5, 6.6, 6.7, 6.8, 6.9, 7, 7.1, 7.2, 7.3, 7.4, 7.5, 7.6, 7.7, 7.8, 7.9, 8, 8.1, 8.2, 8.3, 8.4, 8.5, 8.6, 8.7, 8.8, 8.9, 9, 9.1, 9.2, 9.3, 9.4, 9.5, 9.6, 9.7, 9.8, 9.9, or about 10 mg/kg. Values and ranges intermediate to the recited values are also intended to be part of this invention.

[0422] In another embodiment, the dsRNA is administered at a dose of about 0.1 to about 50 mg/kg, about 0.25 to about 50 mg/kg, about 0.5 to about 50 mg/kg, about 0.75 to about 50 mg/kg, about 1 to about 50 mg/mg, about 1.5 to about 50 mg/kb, about 2 to about 50 mg/kg, about 2.5 to about 50 mg/kg, about 3 to about 50 mg/kg, about 3.5 to about 50 mg/kg, about 4 to about 50 mg/kg, about 4.5 to about 50 mg/kg, about 5 to about 50 mg/kg, about 7.5 to about 50 mg/kg, about 10 to about 50 mg/kg, about 15 to about 50 mg/kg, about 20 to about 50 mg/kg, about 20 to about 50 mg/kg, about 25 to about 50 mg/kg, about 25 to about 50 mg/kg, about 30 to about 50 mg/kg, about 35 to about 50 mg/kg, about 40 to about 50 mg/kg, about 45 to about 50 mg/kg, about 0.1 to about 45 mg/kg, about 0.25 to about 45 mg/kg, about 0.5 to about 45 mg/kg, about 0.75 to about 45 mg/kg, about 1 to about 45 mg/mg, about 1.5 to about 45 mg/kb, about 2 to about 45 mg/kg, about 2.5 to about 45 mg/kg, about 3 to about 45 mg/kg, about 3.5 to about 45 mg/kg, about 4 to about 45 mg/kg, about 4.5 to about 45 mg/kg, about 5 to about 45 mg/kg, about 7.5 to about 45 mg/kg, about 10 to about 45 mg/kg, about 15 to about 45 mg/kg, about 20 to about 45 mg/kg, about 20 to about 45 mg/kg, about 25 to about 45 mg/kg, about 25 to about 45 mg/kg, about 30 to about 45 mg/kg, about 35 to about 45 mg/kg, about 40 to about 45 mg/kg, about 0.1 to about 40 mg/kg, about 0.25 to about 40 mg/kg, about 0.5 to about 40 mg/kg, about 0.75 to about 40 mg/kg, about 1 to about 40 mg/mg, about 1.5 to about 40 mg/kb, about 2 to about 40 mg/kg, about 2.5 to about 40 mg/kg, about 3 to about 40 mg/kg, about 3.5 to about 40 mg/kg, about 4 to about 40 mg/kg, about 4.5 to about 40 mg/kg, about 5 to about 40 mg/kg, about 7.5 to about 40 mg/kg, about 10 to about 40 mg/kg, about 15 to about 40 mg/kg, about 20 to about 40 mg/kg, about 20 to about 40 mg/kg, about 25 to about 40 mg/kg, about 25 to about 40 mg/kg, about 30 to about 40 mg/kg, about 35 to about 40 mg/kg, about 0.1 to about 30 mg/kg, about 0.25 to about 30 mg/kg, about 0.5 to about 30 mg/kg, about 0.75 to about 30 mg/kg, about 1 to about 30 mg/mg, about 1.5 to about 30 mg/kb, about 2 to about 30 mg/kg, about 2.5 to about 30 mg/kg, about 3 to about 30 mg/kg, about 3.5 to about 30 mg/kg, about 4 to about 30 mg/kg, about 4.5 to about 30 mg/kg, about 5 to about 30 mg/kg, about 7.5 to about 30 mg/kg, about 10 to about 30 mg/kg, about 15 to about 30 mg/kg, about 20 to about 30 mg/kg, about 20 to about 30 mg/kg, about 25 to about 30 mg/kg, about 0.1 to about 20 mg/kg, about 0.25 to about 20 mg/kg, about 0.5 to about 20 mg/kg, about 0.75 to about 20 mg/kg, about 1 to about 20 mg/mg, about 1.5 to about 20 mg/kb, about 2 to about 20 mg/kg, about 2.5 to about 20 mg/kg, about 3 to about 20 mg/kg, about 3.5 to about 20 mg/kg, about 4 to about 20 mg/kg, about 4.5 to about 20 mg/kg, about 5 to about 20 mg/kg, about 7.5 to about 20 mg/kg, about 10 to about 20 mg/kg, or about 15 to about 20 mg/kg. Values and ranges intermediate to the recited values are also intended to be part of this invention.

[0423] For example, the dsRNA may be administered at a dose of about 0 . . . 01, 0.02, 0.03, 0.04, 0.05, 0.06, 0.07, 0.08, 0.09, 0.1, 0.2, 0.3, 0.4, 0.5, 0.6, 0.7, 0.8, 0.9, 1, 1.1, 1.2, 1.3, 1.4, 1.5, 1.6, 1.7, 1.8, 1.9, 2, 2.1, 2.2, 2.3, 2.4, 2.5, 2.6, 2.7, 2.8, 2.9, 3, 3.1, 3.2, 3.3, 3.4, 3.5, 3.6, 3.7, 3.8, 3.9, 4, 4.1, 4.2, 4.3, 4.4, 4.5, 4.6, 4.7, 4.8, 4.9, 5, 5.1, 5.2, 5.3, 5.4, 5.5, 5.6, 5.7, 5.8, 5.9, 6, 6.1, 6.2, 6.3, 6.4, 6.5, 6.6, 6.7, 6.8, 6.9, 7, 7.1, 7.2, 7.3, 7.4, 7.5, 7.6, 7.7, 7.8, 7.9, 8, 8.1, 8.2, 8.3, 8.4, 8.5, 8.6, 8.7, 8.8, 8.9, 9, 9.1, 9.2, 9.3, 9.4, 9.5, 9.6, 9.7, 9.8, 9.9, or about 10 mg/kg. Values and ranges intermediate to the recited values are also intended to be part of this invention.

[0424] In another embodiment, the dsRNA is administered at a dose of about 0.5 to about 50 mg/kg, about 0.75 to about 50 mg/kg, about 1 to about 50 mg/mg, about 1.5 to about 50 mg/kb, about 2 to about 50 mg/kg, about 2.5 to about 50 mg/kg, about 3 to about 50 mg/kg, about 3.5 to about 50 mg/kg, about 4 to about 50 mg/kg, about 4.5 to about 50 mg/kg, about 5 to about 50 mg/kg, about 7.5 to about 50 mg/kg, about 10 to about 50 mg/kg, about 15 to about 50 mg/kg, about 20 to about 50 mg/kg, about 20 to about 50 mg/kg, about 25 to about 50 mg/kg, about 25 to about 50 mg/kg, about 30 to about 50 mg/kg, about 35 to about 50 mg/kg, about 40 to about 50 mg/kg, about 45 to about 50 mg/kg, about 0.5 to about 45 mg/kg, about 0.75 to about 45 mg/kg, about 1 to about 45 mg/mg, about 1.5 to about 45 mg/kb, about 2 to about 45 mg/kg, about 2.5 to about 45 mg/kg, about 3 to about 45 mg/kg, about 3.5 to about 45 mg/kg, about 4 to about 45 mg/kg, about 4.5 to about 45 mg/kg, about 5 to about 45 mg/kg, about 7.5 to about 45 mg/kg, about 10 to about 45 mg/kg, about 15 to about 45 mg/kg, about 20 to about 45 mg/kg, about 20 to about 45 mg/kg, about 25 to about 45 mg/kg, about 25 to about 45 mg/kg, about 30 to about 45 mg/kg, about 35 to about 45 mg/kg, about 40 to about 45 mg/kg, about 0.5 to about 40 mg/kg, about 0.75 to about 40 mg/kg, about 1 to about 40 mg/mg, about 1.5 to about 40 mg/kb, about 2 to about 40 mg/kg, about 2.5 to about 40 mg/kg, about 3 to about 40 mg/kg, about 3.5 to about 40 mg/kg, about 4 to about 40 mg/kg, about 4.5 to about 40 mg/kg, about 5 to about 40 mg/kg, about 7.5 to about 40 mg/kg, about 10 to about 40 mg/kg, about 15 to about 40 mg/kg, about 20 to about 40 mg/kg, about 20 to about 40 mg/kg, about 25 to about 40 mg/kg, about 25 to about 40 mg/kg, about 30 to about 40 mg/kg, about 35 to about 40 mg/kg, about 0.5 to about 30 mg/kg, about 0.75 to about 30 mg/kg, about 1 to about 30 mg/mg, about 1.5 to about 30 mg/kb, about 2 to about 30 mg/kg, about 2.5 to about 30 mg/kg, about 3 to about 30 mg/kg, about 3.5 to about 30 mg/kg, about 4 to about 30 mg/kg, about 4.5 to about 30 mg/kg, about 5 to about 30 mg/kg, about 7.5 to about 30 mg/kg, about 10 to about 30 mg/kg, about 15 to about 30 mg/kg, about 20 to about 30 mg/kg, about 20 to about 30 mg/kg, about 25 to about 30 mg/kg, about 0.5 to about 20 mg/kg, about 0.75 to about 20 mg/kg, about 1 to about 20 mg/mg, about 1.5 to about 20 mg/kb, about 2 to about 20 mg/kg, about 2.5 to about 20 mg/kg, about 3 to about 20 mg/kg, about 3.5 to about 20 mg/kg, about 4 to about 20 mg/kg, about 4.5 to about 20 mg/kg, about 5 to about 20 mg/kg, about 7.5 to about 20 mg/kg, about 10 to about 20 mg/kg, or about 15 to about 20 mg/kg. In one embodiment, the dsRNA is administered at a dose of about 10 mg/kg to about 30 mg/kg. Values and ranges intermediate to the recited values are also intended to be part of this invention.

[0425] For example, subjects can be administered, e.g., subcutaneously or intravenously, a single therapeutic amount of iRNA, such as about 0.1, 0.125, 0.15, 0.175, 0.2, 0.225, 0.25, 0.275, 0.3, 0.325, 0.35, 0.375, 0.4, 0.425, 0.45, 0.475, 0.5, 0.525, 0.55, 0.575, 0.6, 0.625, 0.65, 0.675, 0.7, 0.725, 0.75, 0.775, 0.8, 0.825, 0.85, 0.875, 0.9, 0.925, 0.95, 0.975, 1, 1.1, 1.2, 1.3, 1.4, 1.5, 1.6, 1.7, 1.8, 1.9, 2, 2.1, 2.2, 2.3, 2.4, 2.5, 2.6, 2.7, 2.8, 2.9, 3, 3.1, 3.2, 3.3, 3.4, 3.5, 3.6, 3.7, 3.8, 3.9, 4, 4.1, 4.2, 4.3, 4.4, 4.5, 4.6, 4.7, 4.8, 4.9, 5, 5.1, 5.2, 5.3, 5.4, 5.5, 5.6, 5.7, 5.8, 5.9, 6, 6.1, 6.2, 6.3, 6.4, 6.5, 6.6, 6.7, 6.8, 6.9, 7, 7.1, 7.2, 7.3, 7.4, 7.5, 7.6, 7.7, 7.8, 7.9, 8, 8.1, 8.2, 8.3, 8.4, 8.5, 8.6, 8.7, 8.8, 8.9, 9, 9.1, 9.2, 9.3, 9.4, 9.5, 9.6, 9.7, 9.8, 9.9, 10, 10.5, 11, 11.5, 12, 12.5, 13, 13.5, 14, 14.5, 15, 15.5, 16, 16.5, 17, 17.5, 18, 18.5, 19, 19.5, 20, 20.5, 21, 21.5, 22, 22.5, 23, 23.5, 24, 24.5, 25, 25.5, 26, 26.5, 27, 27.5, 28, 28.5, 29, 29.5, 30, 31, 32, 33, 34, 34, 35, 36, 37, 38, 39, 40, 41, 42, 43, 44, 45, 46, 47, 48, 49, or about 50 mg/kg. Values and ranges intermediate to the recited values are also intended to be part of this invention.

[0426] In some embodiments, subjects are administered, e.g., subcutaneously or intravenously, multiple doses of a therapeutic amount of iRNA, such as a dose about 0.1, 0.125, 0.15, 0.175, 0.2, 0.225, 0.25, 0.275, 0.3, 0.325, 0.35, 0.375, 0.4, 0.425, 0.45, 0.475, 0.5, 0.525, 0.55, 0.575, 0.6, 0.625, 0.65, 0.675, 0.7, 0.725, 0.75, 0.775, 0.8, 0.825, 0.85, 0.875, 0.9, 0.925, 0.95, 0.975, 1, 1.1, 1.2, 1.3, 1.4, 1.5, 1.6, 1.7, 1.8, 1.9, 2, 2.1, 2.2, 2.3, 2.4, 2.5, 2.6, 2.7, 2.8, 2.9, 3, 3.1, 3.2, 3.3, 3.4, 3.5, 3.6, 3.7, 3.8, 3.9, 4, 4.1, 4.2, 4.3, 4.4, 4.5, 4.6, 4.7, 4.8, 4.9, 5, 5.1, 5.2, 5.3, 5.4, 5.5, 5.6, 5.7, 5.8, 5.9, 6, 6.1, 6.2, 6.3, 6.4, 6.5, 6.6, 6.7, 6.8, 6.9, 7, 7.1, 7.2, 7.3, 7.4, 7.5, 7.6, 7.7, 7.8, 7.9, 8, 8.1, 8.2, 8.3, 8.4, 8.5, 8.6, 8.7, 8.8, 8.9, 9, 9.1, 9.2, 9.3, 9.4, 9.5, 9.6, 9.7, 9.8, 9.9, 10, 10.5, 11, 11.5, 12, 12.5, 13, 13.5, 14, 14.5, 15, 15.5, 16, 16.5, 17, 17.5, 18, 18.5, 19, 19.5, 20, 20.5, 21, 21.5, 22, 22.5, 23, 23.5, 24, 24.5, 25, 25.5, 26, 26.5, 27, 27.5, 28, 28.5, 29, 29.5, 30, 31, 32, 33, 34, 34, 35, 36, 37, 38, 39, 40, 41, 42, 43, 44, 45, 46, 47, 48, 49, or about 50 mg/kg. A multi-dose regimine may include administration of a therapeutic amount of iRNA daily, such as for two days, three days, four days, five days, six days, seven days, or longer.

[0427] In other embodiments, subjects are administered, e.g., subcutaneously or intravenously, a repeat dose of a therapeutic amount of iRNA, such as a dose about 0.1, 0.125, 0.15, 0.175, 0.2, 0.225, 0.25, 0.275, 0.3, 0.325, 0.35, 0.375, 0.4, 0.425, 0.45, 0.475, 0.5, 0.525, 0.55, 0.575, 0.6, 0.625, 0.65, 0.675, 0.7, 0.725, 0.75, 0.775, 0.8, 0.825, 0.85, 0.875, 0.9, 0.925, 0.95, 0.975, 1, 1.1, 1.2, 1.3, 1.4, 1.5, 1.6, 1.7, 1.8, 1.9, 2, 2.1, 2.2, 2.3, 2.4, 2.5, 2.6, 2.7, 2.8, 2.9, 3, 3.1, 3.2, 3.3, 3.4, 3.5, 3.6, 3.7, 3.8, 3.9, 4, 4.1, 4.2, 4.3, 4.4, 4.5, 4.6, 4.7, 4.8, 4.9, 5, 5.1, 5.2, 5.3, 5.4, 5.5, 5.6, 5.7, 5.8, 5.9, 6, 6.1, 6.2, 6.3, 6.4, 6.5, 6.6, 6.7, 6.8, 6.9, 7, 7.1, 7.2, 7.3, 7.4, 7.5, 7.6, 7.7, 7.8, 7.9, 8, 8.1, 8.2, 8.3, 8.4, 8.5, 8.6, 8.7, 8.8, 8.9, 9, 9.1, 9.2, 9.3, 9.4, 9.5, 9.6, 9.7, 9.8, 9.9, 10, 10.5, 11, 11.5, 12, 12.5, 13, 13.5, 14, 14.5, 15, 15.5, 16, 16.5, 17, 17.5, 18, 18.5, 19, 19.5, 20, 20.5, 21, 21.5, 22, 22.5, 23, 23.5, 24, 24.5, 25, 25.5, 26, 26.5, 27, 27.5, 28, 28.5, 29, 29.5, 30, 31, 32, 33, 34, 34, 35, 36, 37, 38, 39, 40, 41, 42, 43, 44, 45, 46, 47, 48, 49, or about 50 mg/kg. A repeat-dose regimine may include administration of a therapeutic amount of iRNA on a regular basis, such as every other day, every third day, every fourth day, twice a week, once a week, every other week, or once a month.

[0428] In certain embodiments, for example, when a composition of the invention comprises a dsRNA as described herein and a lipid, subjects can be administered a therapeutic amount of iRNA, such as about 0.01 mg/kg to about 5 mg/kg, about 0.01 mg/kg to about 10 mg/kg, about 0.05 mg/kg to about 5 mg/kg, about 0.05 mg/kg to about 10 mg/kg, about 0.1 mg/kg to about 5 mg/kg, about 0.1 mg/kg to about 10 mg/kg, about 0.2 mg/kg to about 5 mg/kg, about 0.2 mg/kg to about 10 mg/kg, about 0.3 mg/kg to about 5 mg/kg, about 0.3 mg/kg to about 10 mg/kg, about 0.4 mg/kg to about 5 mg/kg, about 0.4 mg/kg to about 10 mg/kg, about 0.5 mg/kg to about 5 mg/kg, about 0.5 mg/kg to about 10 mg/kg, about 1 mg/kg to about 5 mg/kg, about 1 mg/kg to about 10 mg/kg, about 1.5 mg/kg to about 5 mg/kg, about 1.5 mg/kg to about 10 mg/kg, about 2 mg/kg to about 2.5 mg/kg, about 2 mg/kg to about 10 mg/kg, about 3 mg/kg to about 5 mg/kg, about 3 mg/kg to about 10 mg/kg, about 3.5 mg/kg to about 5 mg/kg, about 4 mg/kg to about 5 mg/kg, about 4.5 mg/kg to about 5 mg/kg, about 4 mg/kg to about 10 mg/kg, about 4.5 mg/kg to about 10 mg/kg, about 5 mg/kg to about 10 mg/kg, about 5.5 mg/kg to about 10 mg/kg, about 6 mg/kg to about 10 mg/kg, about 6.5 mg/kg to about 10 mg/kg, about 7 mg/kg to about 10 mg/kg, about 7.5 mg/kg to about 10 mg/kg, about 8 mg/kg to about 10 mg/kg, about 8.5 mg/kg to about 10 mg/kg, about 9 mg/kg to about 10 mg/kg, or about 9.5 mg/kg to about 10 mg/kg. Values and ranges intermediate to the recited values are also intended to be part of this invention.

[0429] For example, the dsRNA may be administered at a dose of about 0.1, 0.2, 0.3, 0.4, 0.5, 0.6, 0.7, 0.8, 0.9, 1, 1.1, 1.2, 1.3, 1.4, 1.5, 1.6, 1.7, 1.8, 1.9, 2, 2.1, 2.2, 2.3, 2.4, 2.5, 2.6, 2.7, 2.8, 2.9, 3, 3.1, 3.2, 3.3, 3.4, 3.5, 3.6, 3.7, 3.8, 3.9, 4, 4.1, 4.2, 4.3, 4.4, 4.5, 4.6, 4.7, 4.8, 4.9, 5, 5.1, 5.2, 5.3, 5.4, 5.5, 5.6, 5.7, 5.8, 5.9, 6, 6.1, 6.2, 6.3, 6.4, 6.5, 6.6, 6.7, 6.8, 6.9, 7, 7.1, 7.2, 7.3, 7.4, 7.5, 7.6, 7.7, 7.8, 7.9, 8, 8.1, 8.2, 8.3, 8.4, 8.5, 8.6, 8.7, 8.8, 8.9, 9, 9.1, 9.2, 9.3, 9.4, 9.5, 9.6, 9.7, 9.8, 9.9, or about 10 mg/kg. Values and ranges intermediate to the recited values are also intended to be part of this invention.

[0430] In certain embodiments of the invention, for example, when a double stranded RNAi agent includes a modification (e.g., one or more motifs of three identical modifications on three consecutive nucleotides), including one such motif at or near the cleavage site of the agent, six phosphorothioate linkages, and a ligand, such an agent is administered at a dose of about 0.01 to about 0.5 mg/kg, about 0.01 to about 0.4 mg/kg, about 0.01 to about 0.3 mg/kg, about 0.01 to about 0.2 mg/kg, about 0.01 to about 0.1 mg/kg, about 0.01 mg/kg to about 0.09 mg/kg, about 0.01 mg/kg to about 0.08 mg/kg, about 0.01 mg/kg to about 0.07 mg/kg, about 0.01 mg/kg to about 0.06 mg/kg, about 0.01 mg/kg to about 0.05 mg/kg, about 0.02 to about 0.5 mg/kg, about 0.02 to about 0.4 mg/kg, about 0.02 to about 0.3 mg/kg, about 0.02 to about 0.2 mg/kg, about 0.02 to about 0.1 mg/kg, about 0.02 mg/kg to about 0.09 mg/kg, about 0.02 mg/kg to about 0.08 mg/kg, about 0.02 mg/kg to about 0.07 mg/kg, about 0.02 mg/kg to about 0.06 mg/kg, about 0.02 mg/kg to about 0.05 mg/kg, about 0.03 to about 0.5 mg/kg, about 0.03 to about 0.4 mg/kg, about 0.03 to about 0.3 mg/kg, about 0.03 to about 0.2 mg/kg, about 0.03 to about 0.1 mg/kg, about 0.03 mg/kg to about 0.09 mg/kg, about 0.03 mg/kg to about 0.08 mg/kg, about 0.03 mg/kg to about 0.07 mg/kg, about 0.03 mg/kg to about 0.06 mg/kg, about 0.03 mg/kg to about 0.05 mg/kg, about 0.04 to about 0.5 mg/kg, about 0.04 to about 0.4 mg/kg, about 0.04 to about 0.3 mg/kg, about 0.04 to about 0.2 mg/kg, about 0.04 to about 0.1 mg/kg, about 0.04 mg/kg to about 0.09 mg/kg, about 0.04 mg/kg to about 0.08 mg/kg, about 0.04 mg/kg to about 0.07 mg/kg, about 0.04 mg/kg to about 0.06 mg/kg, about 0.05 to about 0.5 mg/kg, about 0.05 to about 0.4 mg/kg, about 0.05 to about 0.3 mg/kg, about 0.05 to about 0.2 mg/kg, about 0.05 to about 0.1 mg/kg, about 0.05 mg/kg to about 0.09 mg/kg, about 0.05 mg/kg to about 0.08 mg/kg, or about 0.05 mg/kg to about 0.07 mg/kg. Values and ranges intermediate to the foregoing recited values are also intended to be part of this invention, e.g., the RNAi agent may be administered to the subject at a dose of about 0.015 mg/kg to about 0.45 mg/kg.

[0431] For example, the RNAi agent, e.g., RNAi agent in a pharmaceutical composition, may be administered at a dose of about 0.01 mg/kg, 0.0125 mg/kg, 0.015 mg/kg, 0.0175 mg/kg, 0.02 mg/kg, 0.0225 mg/kg, 0.025 mg/kg, 0.0275 mg/kg, 0.03 mg/kg, 0.0325 mg/kg, 0.035 mg/kg, 0.0375 mg/kg, 0.04 mg/kg, 0.0425 mg/kg, 0.045 mg/kg, 0.0475 mg/kg, 0.05 mg/kg, 0.0525 mg/kg, 0.055 mg/kg, 0.0575 mg/kg, 0.06 mg/kg, 0.0625 mg/kg, 0.065 mg/kg, 0.0675 mg/kg, 0.07 mg/kg, 0.0725 mg/kg, 0.075 mg/kg, 0.0775 mg/kg, 0.08 mg/kg, 0.0825 mg/kg, 0.085 mg/kg, 0.0875 mg/kg, 0.09 mg/kg, 0.0925 mg/kg, 0.095 mg/kg, 0.0975 mg/kg, 0.1 mg/kg, 0.125 mg/kg, 0.15 mg/kg, 0.175 mg/kg, 0.2 mg/kg, 0.225 mg/kg, 0.25 mg/kg, 0.275 mg/kg, 0.3 mg/kg, 0.325 mg/kg, 0.35 mg/kg, 0.375 mg/kg, 0.4 mg/kg, 0.425 mg/kg, 0.45 mg/kg, 0.475 mg/kg, or about 0.5 mg/kg. Values intermediate to the foregoing recited values are also intended to be part of this invention.

[0432] In some embodiments, the RNAi agent is administered as a fixed dose of between about 25 mg to about 900 mg, e.g., between about 25 mg to about 850 mg, between about 25 mg to about 500 mg, between about 25 mg to about 400 mg, between about 25 mg to about 300 mg, between about 50 mg to about 850 mg, between about 50 mg to about 500 mg, between about 50 mg to about 400 mg, between about 50 mg to about 300 mg, between about 100 mg to about 850 mg, between about 100 mg to about 500 mg, between about 100 mg to about 400 mg, between about 100 mg to about 300 mg, between about 200 mg to about 850 mg, between about 200 mg to about 500 mg, between about 200 mg to about 400 mg, between about 200 mg to about 300 mg, between about 100 mg to about 800 mg, between about 100 mg to about 750 mg, between about 100 mg to about 700 mg, between about 100 mg to about 650 mg, between about 100 mg to about 600 mg, between about 100 mg to about 550 mg, between about 100 mg to about 500 mg, between about 200 mg to about 850 mg, between about 200 mg to about 800 mg, between about 200 mg to about 750 mg, between about 200 mg to about 700 mg, between about 200 mg to about 650 mg, between about 200 mg to about 600 mg, between about 200 mg to about 550 mg, between about 200 mg to about 500 mg, between about 300 mg to about 850 mg, between about 300 mg to about 800 mg, between about 300 mg to about 750 mg, between about 300 mg to about 700 mg, between about 300 mg to about 650 mg, between about 300 mg to about 600 mg, between about 300 mg to about 550 mg, between about 300 mg to about 500 mg, between about 400 mg to about 850 mg, between about 400 mg to about 800 mg, between about 400 mg to about 750 mg, between about 400 mg to about 700 mg, between about 400 mg to about 650 mg, between about 400 mg to about 600 mg, between about 400 mg to about 550 mg, or between about 400 mg to about 500 mg.

[0433] In some embodiments, the RNAi agent is administered as a fixed dose of about 25 mg, about 50 mg, about 75 mg, about 100 mg, about 125 mg, about 150 mg, about 175 mg, 200 mg, about 225 mg, about 250 mg, about 275 mg, about 300 mg, about 325 mg, about 350 mg, about 375 mg, about 400 mg, about 425 mg, about 450 mg, about 475 mg, about 500 mg, about 525 mg, about 550 mg, about 575 mg, about 600 mg, about 625 mg, about 650 mg, about 675 mg, about 700 mg, about 725 mg, about 750 mg, about 775 mg, about 800 mg, about 825 mg, about 850 mg, about 875 mg, or about 900 mg.

[0434] The pharmaceutical composition can be administered by intravenous infusion over a period of time, such as over a 5, 6, 7, 8, 9, 10, 11, 12, 13, 14, 15, 16, 17, 18, 19, 20, and 21, 22, 23, 24, or about a 25 minute period. The administration may be repeated, for example, on a regular basis, such as weekly, biweekly (i.e., every two weeks) for one month, two months, three months, four months or longer. After an initial treatment regimen, the treatments can be administered on a less frequent basis. For example, after administration weekly or biweekly for three months, administration can be repeated once per month, for six months or a year or longer.

[0435] The pharmaceutical composition can be administered once daily, or the iRNA can be administered as two, three, or more sub-doses at appropriate intervals throughout the day or even using continuous infusion or delivery through a controlled release formulation. In that case, the iRNA contained in each sub-dose must be correspondingly smaller in order to achieve the total daily dosage. The dosage unit can also be compounded for delivery over several days, e.g., using a conventional sustained release formulation which provides sustained release of the iRNA over a several day period. Sustained release formulations are well known in the art and are particularly useful for delivery of agents at a particular site, such as could be used with the agents of the present invention. In this embodiment, the dosage unit contains a corresponding multiple of the daily dose.

[0436] In other embodiments, a single dose of the pharmaceutical compositions can be long lasting, such that subsequent doses are administered at not more than 3, 4, or 5 day intervals, or at not more than 1, 2, 3, or 4 week intervals. In some embodiments of the invention, a single dose of the pharmaceutical compositions of the invention is administered once per week. In other embodiments of the invention, a single dose of the pharmaceutical compositions of the invention is administered bi-monthly (i.e., every two weeks) for one month, two months, three months, four months or longer. After an initial treatment regimen, the treatments can be administered on a less frequent basis. For example, after administration weekly or biweekly for three months, administration can be repeated once per month, for six months or a year or longer, e.g., administered chronically.

[0437] The skilled artisan will appreciate that certain factors can influence the dosage and timing required to effectively treat a subject, including but not limited to the severity of the disease or disorder, previous treatments, the general health and/or age of the subject, and other diseases present. Moreover, treatment of a subject with a therapeutically effective amount of a composition can include a single treatment or a series of treatments. Estimates of effective dosages and in vivo half-lives for the individual iRNAs encompassed by the invention can be made using conventional methodologies or on the basis of in vivo testing using an appropriate animal model, as described elsewhere herein.

[0438] Advances in mouse genetics have generated a number of mouse models for the study of various human diseases, such as a disorder that would benefit from reduction in the expression of C5. Such models can be used for in vivo testing of iRNA, as well as for determining a therapeutically effective dose. Suitable mouse models are known in the art and include, for example, collagen-induced arthritis mouse model (Courtenay, J. S., et al. (1980) Nature 283, 666-668), myocardial ischemia (Homeister J W and Lucchesi B R (1994) Annu Rev Pharmacol Toxicol 34:17-40), ovalbumin induced asthma mouse models (e.g., Tomkinson A., et al. (2001). J. Immunol. 166, 5792-5800), (NZB×NZW)F1, MRL/Fas^{lpr} (MRL/lpr) and BXSB mouse models (Theofilopoulos, A. N. and Kono, D. H. 1999. Murine lupus models: gene-specific and genome-wide studies. In Lahita R. G., ed., Systemic Lupus Erythematosus, 3rd edn, p. 145. Academic Press, San Diego, CA), mouse aHUS model (Goicoechea de Jorge et al. (2011) The development of atypical hemolytic uremic syndrome depends on complement C5, J Am Soc Nephrol 22:137-145.

[0439] The pharmaceutical compositions of the present invention can be administered in a number of ways depending upon whether local or systemic treatment is desired and upon the area to be treated. Administration can be topical (e.g., by a transdermal patch), pulmonary, e.g., by inhalation or insufflation of powders or aerosols, including by nebulizer; intratracheal, intranasal, epidermal and transdermal, oral or parenteral. Parenteral administration includes intravenous, intraarterial, subcutaneous, intraperitoneal or intramuscular injection or infusion; subdermal, e.g., via an implanted device; or intracranial, e.g., by intraparenchymal, intrathecal or intraventricular, administration.

[0440] The iRNA can be delivered in a manner to target a particular tissue, such as the liver (e.g., the hepatocytes of the liver).

[0441] Pharmaceutical compositions and formulations for topical administration can include transdermal patches, ointments, lotions, creams, gels, drops, suppositories, sprays, liquids and powders. Conventional pharmaceutical carriers, aqueous, powder or oily bases, thickeners and the like can be necessary or desirable. Coated condoms, gloves and the like can also be useful. Suitable topical formulations include those in which the iRNAs featured in the invention are in admixture with a topical delivery agent such as lipids, liposomes, fatty acids, fatty acid esters, steroids, chelating agents and surfactants. Suitable lipids and liposomes include neutral (e.g., dioleoylphosphatidyl DOPE ethanolamine, dimyristoylphosphatidyl choline DMPC, distearolyphosphatidyl choline) negative (e.g., dimyristoylphosphatidyl glycerol DMPG) and cationic (e.g., dioleoyltetramethylaminopropyl DOTAP and dioleoylphosphatidyl ethanolamine DOTMA). iRNAs featured in the invention can be encapsulated within liposomes or can form complexes thereto, in particular to cationic liposomes. Alternatively, iRNAs can be complexed to lipids, in particular to cationic lipids. Suitable fatty acids and esters include but are not limited to arachidonic acid, oleic acid, eicosanoic acid, lauric acid, caprylic acid, capric acid, myristic acid, palmitic acid, stearic acid, linoleic acid, linolenic acid, dicaprate, tricaprate, monoolein, dilaurin, glyceryl 1-monocaprate, 1-dodecylazacycloheptan-2-one, an acylcarnitine, an acylcholine, or a C1-20 alkyl ester (e.g., isopropylmyristate IPM), monoglyceride, diglyceride or pharmaceutically acceptable salt thereof). Topical formulations are described in detail in U.S. Pat. No. 6,747,014, which is incorporated herein by reference.

A. iRNA Formulations Comprising Membranous Molecular Assemblies

[0442] An iRNA for use in the compositions and methods of the invention can be formulated for delivery in a membranous molecular assembly, e.g., a liposome or a micelle. As used herein, the term “liposome” refers to a vesicle composed of amphiphilic lipids arranged in at least one bilayer, e.g., one bilayer or a plurality of bilayers. Liposomes include unilamellar and multilamellar vesicles that have a membrane formed from a lipophilic material and an aqueous interior. The aqueous portion contains the iRNA composition. The lipophilic material isolates the aqueous interior from an aqueous exterior, which typically does not include the iRNA composition, although in some examples, it may. Liposomes are useful for the transfer and delivery of active ingredients to the site of action. Because the liposomal membrane is structurally similar to biological membranes, when liposomes are applied to a tissue, the liposomal bilayer fuses with bilayer of the cellular membranes. As the merging of the liposome and cell progresses, the internal aqueous contents that include the iRNA are delivered into the cell where the iRNA can specifically bind to a target RNA and can mediate RNAi. In some cases the liposomes are also specifically targeted, e.g., to direct the iRNA to particular cell types. A liposome containing a RNAi agent can be prepared by a variety of methods. In one example, the lipid component of a liposome is dissolved in a detergent so that micelles are formed with the lipid component. For example, the lipid component can be an amphipathic cationic lipid or lipid conjugate. The detergent can have a high critical micelle concentration and may be nonionic. Exemplary detergents include cholate, CHAPS, octylglucoside, deoxycholate, and lauroyl sarcosine. The RNAi agent preparation is then added to the micelles that include the lipid component. The cationic groups on the lipid interact with the RNAi agent and condense around the RNAi agent to form a liposome. After condensation, the detergent is removed, e.g., by dialysis, to yield a liposomal preparation of RNAi agent.

[0443] If necessary a carrier compound that assists in condensation can be added during the condensation reaction, e.g., by controlled addition. For example, the carrier compound can be a polymer other than a nucleic acid (e.g., spermine or spermidine). pH can also adjusted to favor condensation.

[0444] Methods for producing stable polynucleotide delivery vehicles, which incorporate a polynucleotide/cationic lipid complex as structural components of the delivery vehicle, are further described in, e.g., WO 96/37194, the entire contents of which are incorporated herein by reference. Liposome formation can also include one or more aspects of exemplary methods described in Felgner, P. L. et al., Proc. Natl. Acad. Sci., USA 8:7413-7417, 1987; U.S. Pat. Nos. 4,897,355; 5,171,678; Bangham, et al. M. Mol. Biol. 23:238, 1965; Olson, et al. Biochim. Biophys. Acta 557:9, 1979; Szoka, et al. Proc. Natl. Acad. Sci. 75: 4194, 1978; Mayhew, et al. Biochim. Biophys. Acta 775:169, 1984; Kim, et al. Biochim. Biophys. Acta 728:339, 1983; and Fukunaga, et al. Endocrinol. 115:757, 1984. Commonly used techniques for preparing lipid aggregates of appropriate size for use as delivery vehicles include sonication and freeze-thaw plus extrusion (see, e.g., Mayer, et al. Biochim. Biophys. Acta 858: 161, 1986). Microfluidization can be used when consistently small (50 to 200 nm) and relatively uniform aggregates are desired (Mayhew, et al. Biochim. Biophys. Acta 775:169, 1984). These methods are readily adapted to packaging RNAi agent preparations into liposomes.

[0445] Liposomes fall into two broad classes. Cationic liposomes are positively charged liposomes which interact with the negatively charged nucleic acid molecules to form a stable complex. The positively charged nucleic acid/liposome complex binds to the negatively charged cell surface and is internalized in an endosome. Due to the acidic pH within the endosome, the liposomes are ruptured, releasing their contents into the cell cytoplasm (Wang et al., Biochem. Biophys. Res. Commun., 1987, 147, 980-985).

[0446] Liposomes which are pH-sensitive or negatively-charged, entrap nucleic acids rather than complex with it. Since both the nucleic acid and the lipid are similarly charged, repulsion rather than complex formation occurs. Nevertheless, some nucleic acid is entrapped within the aqueous interior of these liposomes. pH-sensitive liposomes have been used to deliver nucleic acids encoding the thymidine kinase gene to cell monolayers in culture. Expression of the exogenous gene was detected in the target cells (Zhou et al., Journal of Controlled Release, 1992, 19, 269-274).

[0447] One major type of liposomal composition includes phospholipids other than naturally-derived phosphatidylcholine. Neutral liposome compositions, for example, can be formed from dimyristoyl phosphatidylcholine (DMPC) or dipalmitoyl phosphatidylcholine (DPPC). Anionic liposome compositions generally are formed from dimyristoyl phosphatidylglycerol, while anionic fusogenic liposomes are formed primarily from dioleoyl phosphatidylethanolamine (DOPE). Another type of liposomal composition is formed from phosphatidylcholine (PC) such as, for example, soybean PC, and egg PC. Another type is formed from mixtures of phospholipid and/or phosphatidylcholine and/or cholesterol.

[0448] Examples of other methods to introduce liposomes into cells in vitro and in vivo include U.S. Pat. Nos. 5,283,185; 5,171,678; WO 94/00569; WO 93/24640; WO 91/16024; Felgner, J. Biol. Chem. 269:2550, 1994; Nabel, Proc. Natl. Acad. Sci. 90:11307, 1993; Nabel, Human Gene Ther. 3:649, 1992; Gershon, Biochem. 32:7143, 1993; and Strauss EMBO J. 11:417, 1992.

[0449] Non-ionic liposomal systems have also been examined to determine their utility in the delivery of drugs to the skin, in particular systems comprising non-ionic surfactant and cholesterol. Non-ionic liposomal formulations comprising Novasome™ I (glyceryl dilaurate/cholesterol/polyoxyethylene-10-stearyl ether) and Novasome™ II (glyceryl distearate/cholesterol/polyoxyethylene-10-stearyl ether) were used to deliver cyclosporin-A into the dermis of mouse skin. Results indicated that such non-ionic liposomal systems were effective in facilitating the deposition of cyclosporine A into different layers of the skin (Hu et al. S. T. P. Pharma. Sci., 1994, 4(6) 466).

[0450] Liposomes also include “sterically stabilized” liposomes, a term which, as used herein, refers to liposomes comprising one or more specialized lipids that, when incorporated into liposomes, result in enhanced circulation lifetimes relative to liposomes lacking such specialized lipids. Examples of sterically stabilized liposomes are those in which part of the vesicle-forming lipid portion of the liposome (A) comprises one or more glycolipids, such as monosialoganglioside G_{M1}, or (B) is derivatized with one or more hydrophilic polymers, such as a polyethylene glycol (PEG) moiety. While not wishing to be bound by any particular theory, it is thought in the art that, at least for sterically stabilized liposomes containing gangliosides, sphingomyelin, or PEG-derivatized lipids, the enhanced circulation half-life of these sterically stabilized liposomes derives from a reduced uptake into cells of the reticuloendothelial system (RES) (Allen et al., FEBS Letters, 1987, 223, 42; Wu et al., Cancer Research, 1993, 53, 3765).

[0451] Various liposomes comprising one or more glycolipids are known in the art. Papahadjopoulos et al. (Ann. N.Y. Acad. Sci., 1987, 507, 64) reported the ability of monosialoganglioside G_{M1}, galactocerebroside sulfate and phosphatidylinositol to improve blood half-lives of liposomes. These findings were expounded upon by Gabizon et al. (Proc. Natl. Acad. Sci. U.S.A., 1988, 85, 6949). U.S. Pat. No. 4,837,028 and WO 88/04924, both to Allen et al., disclose liposomes comprising (1) sphingomyelin and (2) the ganglioside G_{M1} or a galactocerebroside sulfate ester. U.S. Pat. No. 5,543,152 (Webb et al.) discloses liposomes comprising sphingomyelin. Liposomes comprising 1,2-sn-dimyristoylphosphatidylcholine are disclosed in WO 97/13499 (Lim et al).

[0452] In one embodiment, cationic liposomes are used. Cationic liposomes possess the advantage of being able to fuse to the cell membrane. Non-cationic liposomes, although not able to fuse as efficiently with the plasma membrane, are taken up by macrophages in vivo and can be used to deliver RNAi agents to macrophages.

[0453] Further advantages of liposomes include: liposomes obtained from natural phospholipids are biocompatible and biodegradable; liposomes can incorporate a wide range of water and lipid soluble drugs; liposomes can protect encapsulated RNAi agents in their internal compartments from metabolism and degradation (Rosoff, in “Pharmaceutical Dosage Forms,” Lieberman, Rieger and Banker (Eds.), 1988, volume 1, p. 245). Important considerations in the preparation of liposome formulations are the lipid surface charge, vesicle size and the aqueous volume of the liposomes.

[0454] A positively charged synthetic cationic lipid, N-[1-(2,3-dioleyloxy)propyl]-N,N,N-trimethylammonium chloride (DOTMA) can be used to form small liposomes that interact spontaneously with nucleic acid to form lipid-nucleic acid complexes which are capable of fusing with the negatively charged lipids of the cell membranes of tissue culture cells, resulting in delivery of RNAi agent (see, e.g., Felgner, P. L. et al., Proc. Natl. Acad. Sci., USA 8:7413-7417, 1987 and U.S. Pat. No. 4,897,355 for a description of DOTMA and its use with DNA).

[0455] A DOTMA analogue, 1,2-bis(oleoyloxy)-3-(trimethylammonia)propane (DOTAP) can be used in combination with a phospholipid to form DNA-complexing vesicles. Lipofectin™ Bethesda Research Laboratories, Gaithersburg, Md.) is an effective agent for the delivery of highly anionic nucleic acids into living tissue culture cells that comprise positively charged DOTMA liposomes which interact spontaneously with negatively charged polynucleotides to form complexes. When enough positively charged liposomes are used, the net charge on the resulting complexes is also positive. Positively charged complexes prepared in this way spontaneously attach to negatively charged cell surfaces, fuse with the plasma membrane, and efficiently deliver functional nucleic acids into, for example, tissue culture cells. Another commercially available cationic lipid, 1,2-bis(oleoyloxy)-3,3-(trimethylammonia)propane (“DOTAP”) (Boehringer Mannheim, Indianapolis, Indiana) differs from DOTMA in that the oleoyl moieties are linked by ester, rather than ether linkages.

[0456] Other reported cationic lipid compounds include those that have been conjugated to a variety of moieties including, for example, carboxyspermine which has been conjugated to one of two types of lipids and includes compounds such as 5-carboxyspermylglycine dioctaoleoylamide (“DOGS”) (Transfectam™, Promega, Madison, Wisconsin) and dipalmitoylphosphatidylethanolamine 5-carboxyspermyl-amide (“DPPES”) (see, e.g., U.S. Pat. No. 5,171,678).

[0457] Another cationic lipid conjugate includes derivatization of the lipid with cholesterol (“DC-Chol”) which has been formulated into liposomes in combination with DOPE (See, Gao, X. and Huang, L., Biochim. Biophys. Res. Commun. 179:280, 1991). Lipopolylysine, made by conjugating polylysine to DOPE, has been reported to be effective for transfection in the presence of serum (Zhou, X. et al., Biochim. Biophys. Acta 1065:8, 1991). For certain cell lines, these liposomes containing conjugated cationic lipids, are said to exhibit lower toxicity and provide more efficient transfection than the DOTMA-containing compositions. Other commercially available cationic lipid products include DMRIE and DMRIE-HP (Vical, La Jolla, California) and Lipofectamine (DOSPA) (Life Technology, Inc., Gaithersburg, Maryland). Other cationic lipids suitable for the delivery of oligonucleotides are described in WO 98/39359 and WO 96/37194.

[0458] Liposomal formulations are particularly suited for topical administration, liposomes present several advantages over other formulations. Such advantages include reduced side effects related to high systemic absorption of the administered drug, increased accumulation of the administered drug at the desired target, and the ability to administer RNAi agent into the skin. In some implementations, liposomes are used for delivering RNAi agent to epidermal cells and also to enhance the penetration of RNAi agent into dermal tissues, e.g., into skin. For example, the liposomes can be applied topically. Topical delivery of drugs formulated as liposomes to the skin has been documented (see, e.g., Weiner et al., Journal of Drug Targeting, 1992, vol. 2,405-410 and du Plessis et al., Antiviral Research, 18, 1992, 259-265; Mannino, R. J. and Fould-Fogerite, S., Biotechniques 6:682-690, 1988; Itani, T. et al. Gene 56:267-276. 1987; Nicolau, C. et al. Meth. Enz. 149:157-176, 1987; Straubinger, R. M. and Papahadjopoulos, D. Meth. Enz. 101:512-527, 1983; Wang, C. Y. and Huang, L., Proc. Natl. Acad. Sci. USA 84:7851-7855, 1987).

[0459] Non-ionic liposomal systems have also been examined to determine their utility in the delivery of drugs to the skin, in particular systems comprising non-ionic surfactant and cholesterol. Non-ionic liposomal formulations comprising Novasome I (glyceryl dilaurate/cholesterol/polyoxyethylene-10-stearyl ether) and Novasome II (glyceryl distearate/cholesterol/polyoxyethylene-10-stearyl ether) were used to deliver a drug into the dermis of mouse skin. Such formulations with RNAi agent are useful for treating a dermatological disorder.

[0460] Liposomes that include iRNA can be made highly deformable. Such deformability can enable the liposomes to penetrate through pore that are smaller than the average radius of the liposome. For example, transfersomes are a type of deformable liposomes. Transferosomes can be made by adding surface edge activators, usually surfactants, to a standard liposomal composition. Transfersomes that include RNAi agent can be delivered, for example, subcutaneously by infection in order to deliver RNAi agent to keratinocytes in the skin. In order to cross intact mammalian skin, lipid vesicles must pass through a series of fine pores, each with a diameter less than 50 nm, under the influence of a suitable transdermal gradient. In addition, due to the lipid properties, these transferosomes can be self-optimizing (adaptive to the shape of pores, e.g., in the skin), self-repairing, and can frequently reach their targets without fragmenting, and often self-loading.

[0461] Other formulations amenable to the present invention are described in U.S. provisional application Ser. No. 61/018,616, filed Jan. 2, 2008; 61/018,611, filed Jan. 2, 2008; 61/039,748, filed Mar. 26, 2008; 61/047,087, filed Apr. 22, 2008 and 61/051,528, filed May 8, 2008. PCT application no PCT/US2007/080331, filed Oct. 3, 2007 also describes formulations that are amenable to the present invention.

[0462] Transfersomes are yet another type of liposomes, and are highly deformable lipid aggregates which are attractive candidates for drug delivery vehicles. Transfersomes can be described as lipid droplets which are so highly deformable that they are easily able to penetrate through pores which are smaller than the droplet. Transfersomes are adaptable to the environment in which they are used, e.g., they are self-optimizing (adaptive to the shape of pores in the skin), self-repairing, frequently reach their targets without fragmenting, and often self-loading. To make transfersomes it is possible to add surface edge-activators, usually surfactants, to a standard liposomal composition. Transfersomes have been used to deliver serum albumin to the skin. The transfersome-mediated delivery of serum albumin has been shown to be as effective as subcutaneous injection of a solution containing serum albumin.

[0463] Surfactants find wide application in formulations such as emulsions (including microemulsions) and liposomes. The most common way of classifying and ranking the properties of the many different types of surfactants, both natural and synthetic, is by the use of the hydrophile/lipophile balance (HLB). The nature of the hydrophilic group (also known as the “head”) provides the most useful means for categorizing the different surfactants used in formulations (Rieger, in “Pharmaceutical Dosage Forms”, Marcel Dekker, Inc., New York, N. Y., 1988, p. 285).

[0464] If the surfactant molecule is not ionized, it is classified as a nonionic surfactant. Nonionic surfactants find wide application in pharmaceutical and cosmetic products and are usable over a wide range of pH values. In general their HLB values range from 2 to about 18 depending on their structure. Nonionic surfactants include nonionic esters such as ethylene glycol esters, propylene glycol esters, glyceryl esters, polyglyceryl esters, sorbitan esters, sucrose esters, and ethoxylated esters. Nonionic alkanolamides and ethers such as fatty alcohol ethoxylates, propoxylated alcohols, and ethoxylated/propoxylated block polymers are also included in this class. The polyoxyethylene surfactants are the most popular members of the nonionic surfactant class.

[0465] If the surfactant molecule carries a negative charge when it is dissolved or dispersed in water, the surfactant is classified as anionic. Anionic surfactants include carboxylates such as soaps, acyl lactylates, acyl amides of amino acids, esters of sulfuric acid such as alkyl sulfates and ethoxylated alkyl sulfates, sulfonates such as alkyl benzene sulfonates, acyl isethionates, acyl taurates and sulfosuccinates, and phosphates. The most important members of the anionic surfactant class are the alkyl sulfates and the soaps.

[0466] If the surfactant molecule carries a positive charge when it is dissolved or dispersed in water, the surfactant is classified as cationic. Cationic surfactants include quaternary ammonium salts and ethoxylated amines. The quaternary ammonium salts are the most used members of this class.

[0467] If the surfactant molecule has the ability to carry either a positive or negative charge, the surfactant is classified as amphoteric. Amphoteric surfactants include acrylic acid derivatives, substituted alkylamides, N-alkylbetaines and phosphatides.

[0468] The use of surfactants in drug products, formulations and in emulsions has been reviewed (Rieger, in “Pharmaceutical Dosage Forms”, Marcel Dekker, Inc., New York, N.Y., 1988, p. 285).

[0469] The iRNA for use in the methods of the invention can also be provided as micellar formulations. “Micelles” are defined herein as a particular type of molecular assembly in which amphipathic molecules are arranged in a spherical structure such that all the hydrophobic portions of the molecules are directed inward, leaving the hydrophilic portions in contact with the surrounding aqueous phase. The converse arrangement exists if the environment is hydrophobic.

[0470] A mixed micellar formulation suitable for delivery through transdermal membranes may be prepared by mixing an aqueous solution of the siRNA composition, an alkali metal C8 to C22 alkyl sulphate, and a micelle forming compounds. Exemplary micelle forming compounds include lecithin, hyaluronic acid, pharmaceutically acceptable salts of hyaluronic acid, glycolic acid, lactic acid, chamomile extract, cucumber extract, oleic acid, linoleic acid, linolenic acid, monoolein, monooleates, monolaurates, borage oil, evening of primrose oil, menthol, trihydroxy oxo cholanyl glycine and pharmaceutically acceptable salts thereof, glycerin, polyglycerin, lysine, polylysine, triolein, polyoxyethylene ethers and analogues thereof, polidocanol alkyl ethers and analogues thereof, chenodeoxycholate, deoxycholate, and mixtures thereof. The micelle forming compounds may be added at the same time or after addition of the alkali metal alkyl sulphate. Mixed micelles will form with substantially any kind of mixing of the ingredients but vigorous mixing in order to provide smaller size micelles.

[0471] In one method a first micellar composition is prepared which contains the siRNA composition and at least the alkali metal alkyl sulphate. The first micellar composition is then mixed with at least three micelle forming compounds to form a mixed micellar composition. In another method, the micellar composition is prepared by mixing the siRNA composition, the alkali metal alkyl sulphate and at least one of the micelle forming compounds, followed by addition of the remaining micelle forming compounds, with vigorous mixing.

[0472] Phenol and/or m-cresol may be added to the mixed micellar composition to stabilize the formulation and protect against bacterial growth. Alternatively, phenol and/or m-cresol may be added with the micelle forming ingredients. An isotonic agent such as glycerin may also be added after formation of the mixed micellar composition.

[0473] For delivery of the micellar formulation as a spray, the formulation can be put into an aerosol dispenser and the dispenser is charged with a propellant. The propellant, which is under pressure, is in liquid form in the dispenser. The ratios of the ingredients are adjusted so that the aqueous and propellant phases become one, i.e., there is one phase. If there are two phases, it is necessary to shake the dispenser prior to dispensing a portion of the contents, e.g., through a metered valve. The dispensed dose of pharmaceutical agent is propelled from the metered valve in a fine spray.

[0474] Propellants may include hydrogen-containing chlorofluorocarbons, hydrogen-containing fluorocarbons, dimethyl ether and diethyl ether. In certain embodiments, HFA 134a (1,1,1,2 tetrafluoroethane) may be used.

[0475] The specific concentrations of the essential ingredients can be determined by relatively straightforward experimentation. For absorption through the oral cavities, it is often desirable to increase, e.g., at least double or triple, the dosage for through injection or administration through the gastrointestinal tract.

### B. Lipid Particles

[0476] iRNAs, e.g., dsRNAs of in the invention may be fully encapsulated in a lipid formulation, e.g., a LNP, or other nucleic acid-lipid particle.

[0477] As used herein, the term “LNP” refers to a stable nucleic acid-lipid particle. LNPs typically contain a cationic lipid, a non-cationic lipid, and a lipid that prevents aggregation of the particle (e.g., a PEG-lipid conjugate). LNPs are extremely useful for systemic applications, as they exhibit extended circulation lifetimes following intravenous (i.v.) injection and accumulate at distal sites (e.g., sites physically separated from the administration site). LNPs include “pSPLP,” which include an encapsulated condensing agent-nucleic acid complex as set forth in PCT Publication No. WO 00/03683. The particles of the present invention typically have a mean diameter of about 50 nm to about 150 nm, more typically about 60 nm to about 130 nm, more typically about 70 nm to about 110 nm, most typically about 70 nm to about 90 nm, and are substantially nontoxic. In addition, the nucleic acids when present in the nucleic acid-lipid particles of the present invention are resistant in aqueous solution to degradation with a nuclease. Nucleic acid-lipid particles and their method of preparation are disclosed in, e.g., U.S. Pat. Nos. 5,976,567; 5,981,501; 6,534,484; 6,586,410; 6,815,432; U.S. Publication No. 2010/0324120 and PCT Publication No. WO 96/40964.

[0478] In one embodiment, the lipid to drug ratio (mass/mass ratio) (e.g., lipid to dsRNA ratio) will be in the range of from about 1:1 to about 50:1, from about 1:1 to about 25:1, from about 3:1 to about 15:1, from about 4:1 to about 10:1, from about 5:1 to about 9:1, or about 6:1 to about 9:1. Ranges intermediate to the above recited ranges are also contemplated to be part of the invention.

[0479] The cationic lipid can be, for example, N,N-dioleyl-N,N-dimethylammonium chloride (DODAC), N,N-distearyl-N,N-dimethylammonium bromide (DDAB), N—(I-(2,3-dioleoyloxy)propyl)-N,N,N-trimethylammonium chloride (DOTAP), N—(I-(2,3-dioleyloxy)propyl)-N,N,N-trimethylammonium chloride (DOTMA), N,N-dimethyl-2,3-dioleyloxy)propylamine (DODMA), 1,2-DiLinoleyloxy-N,N-dimethylaminopropane (DLinDMA), 1,2-Dilinolenyloxy-N,N-dimethylaminopropane (DLenDMA), 1,2-Dilinoleylcarbamoyloxy-3-dimethylaminopropane (DLin-C-DAP), 1,2-Dilinoleyoxy-3-(dimethylamino)acetoxypropane (DLin-DAC), 1,2-Dilinoleyoxy-3-morpholinopropane (DLin-MA), 1,2-Dilinoleoyl-3-dimethylaminopropane (DLinDAP), 1,2-Dilinoleylthio-3-dimethylaminopropane (DLin-S-DMA), 1-Linoleoyl-2-linoleyloxy-3-dimethylaminopropane (DLin-2-DMAP), 1,2-Dilinoleyloxy-3-trimethylaminopropane chloride salt (DLin-TMA.C1), 1,2-Dilinoleoyl-3-trimethylaminopropane chloride salt (DLin-TAP.Cl), 1,2-Dilinoleyloxy-3-(N-methylpiperazino)propane (DLin-MPZ), or 3-(N,N-Dilinoleylamino)-1,2-propanediol (DLinAP), 3-(N,N-Dioleylamino)-1,2-propanedio (DOAP), 1,2-Dilinoleyloxo-3-(2-N,N-dimethylamino)ethoxypropane (DLin-EG-DMA), 1,2-Dilinolenyloxy-N,N-dimethylaminopropane (DLinDMA), 2,2-Dilinoleyl-4-dimethylaminomethyl-[1,3]-dioxolane (DLin-K-DMA) or analogs thereof, (3aR,5s,6aS)—N,N-dimethyl-2,2-di((9Z,12Z)-octadeca-9,12-dienyl)tetrahydro-3aH-cyclopenta[d][1,3]dioxol-5-amine (ALN100), (6Z,9Z,28Z,31Z)-heptatriaconta-6,9,28,31-tetraen-19-yl 4-(dimethylamino)butanoate (MC3), 1, 1′-(2-(4-(2-((2-(bis(2-hydroxydodecyl)amino)ethyl)(2-hydroxydodecyl)amino)ethyl)piperazin-1-yl)ethylazanediyl)didodecan-2-ol (Tech G1), or a mixture thereof. The cationic lipid can comprise from about 20 mol % to about 50 mol % or about 40 mol % of the total lipid present in the particle.

[0480] In another embodiment, the compound 2,2-Dilinoleyl-4-dimethylaminoethyl-[1,3]-dioxolane can be used to prepare lipid-siRNA nanoparticles. Synthesis of 2,2-Dilinoleyl-4-dimethylaminoethyl-[1,3]-dioxolane is described in U.S. provisional patent application No. 61/107,998 filed on Oct. 23, 2008, which is herein incorporated by reference.

[0481] In one embodiment, the lipid-siRNA particle includes 40%2, 2-Dilinoleyl-4-dimethylaminoethyl-[1,3]-dioxolane: 10% DSPC: 40% Cholesterol: 10% PEG-C-DOMG (mole percent) with a particle size of 63.0±20 nm and a 0.027 siRNA/Lipid Ratio.

[0482] The ionizable/non-cationic lipid can be an anionic lipid or a neutral lipid including, but not limited to, distearoylphosphatidylcholine (DSPC), dioleoylphosphatidylcholine (DOPC), dipalmitoylphosphatidylcholine (DPPC), dioleoylphosphatidylglycerol (DOPG), dipalmitoylphosphatidylglycerol (DPPG), dioleoyl-phosphatidylethanolamine (DOPE), palmitoyloleoylphosphatidylcholine (POPC), palmitoyloleoylphosphatidylethanolamine (POPE), dioleoyl-phosphatidylethanolamine 4-(N-maleimidomethyl)-cyclohexane-1-carboxylate (DOPE-mal), dipalmitoyl phosphatidyl ethanolamine (DPPE), dimyristoylphosphoethanolamine (DMPE), distearoyl-phosphatidyl-ethanolamine (DSPE), 16-O-monomethyl PE, 16-O-dimethyl PE, 18-1-trans PE, 1-stearoyl-2-oleoyl-phosphatidyethanolamine (SOPE), cholesterol, or a mixture thereof. The non-cationic lipid can be from about 5 mol % to about 90 mol %, about 10 mol %, or about 58 mol % if cholesterol is included, of the total lipid present in the particle. The conjugated lipid that inhibits aggregation of particles can be, for example, a polyethyleneglycol (PEG)-lipid including, without limitation, a PEG-diacylglycerol (DAG), a PEG-dialkyloxypropyl (DAA), a PEG-phospholipid, a PEG-ceramide (Cer), or a mixture thereof. The PEG-DAA conjugate can be, for example, a PEG-dilauryloxypropyl (Ci₂), a PEG-dimyristyloxypropyl (Ci₄), a PEG-dipalmityloxypropyl (Ci₆), or a PEG-distearyloxypropyl (C]₈). The conjugated lipid that prevents aggregation of particles can be from 0 mol % to about 20 mol % or about 2 mol % of the total lipid present in the particle.

[0483] In some embodiments, the nucleic acid-lipid particle further includes cholesterol at, e.g., about 10 mol % to about 60 mol % or about 48 mol % of the total lipid present in the particle.

[0484] In one embodiment, the lipidoid ND98·4HCl (MW 1487) (see U.S. patent application Ser. No. 12/056,230, filed Mar. 26, 2008, which is incorporated herein by reference), Cholesterol (Sigma-Aldrich), and PEG-Ceramide C16 (Avanti Polar Lipids) can be used to prepare lipid-dsRNA nanoparticles (i.e., LNP01 particles). Stock solutions of each in ethanol can be prepared as follows: ND98, 133 mg/ml; Cholesterol, 25 mg/ml, PEG-Ceramide C16, 100 mg/ml. The ND98, Cholesterol, and PEG-Ceramide C16 stock solutions can then be combined in a, e.g., 42:48:10 molar ratio. The combined lipid solution can be mixed with aqueous dsRNA (e.g., in sodium acetate pH 5) such that the final ethanol concentration is about 35-45% and the final sodium acetate concentration is about 100-300 mM. Lipid-dsRNA nanoparticles typically form spontaneously upon mixing. Depending on the desired particle size distribution, the resultant nanoparticle mixture can be extruded through a polycarbonate membrane (e.g., 100 nm cut-off) using, for example, a thermobarrel extruder, such as Lipex Extruder (Northern Lipids, Inc). In some cases, the extrusion step can be omitted. Ethanol removal and simultaneous buffer exchange can be accomplished by, for example, dialysis or tangential flow filtration. Buffer can be exchanged with, for example, phosphate buffered saline (PBS) at about pH 7, e.g., about pH 6.9, about pH 7.0, about pH 7.1, about pH 7.2, about pH 7.3, or about pH 7.4.

[chemical structure]

[0485] LNP01 formulations are described, e.g., in International Application Publication No. WO 2008/042973, which is hereby incorporated by reference.

[0486] Additional exemplary lipid-dsRNA formulations are described in Table 1.

TABLE 1

| | | cationic lipid/non-cationic |
|---|---|---|
| | | lipid/cholesterol/PEG-lipid conjugate |
| | Ionizable/Cationic Lipid | Lipid:siRNA ratio |
| SNALP-1 | 1,2-Dilinolenyloxy-N,N-dimethylaminopropane | DLinDMA/DPPC/Cholesterol/PEG-cDMA |
| | (DLinDMA) | (57.1/7.1/34.4/1.4) |
| | | lipid:siRNA~7:1 |
| 2-XTC | 2,2-Dilinoleyl-4-dimethylaminoethyl-[1,3]- | XTC/DPPC/Cholesterol/PEG-cDMA |
| | dioxolane (XTC) | 57.1/7.1/34.4/1.4 |
| | | lipid:siRNA~7:1 |
| LNP05 | 2,2-Dilinoleyl-4-dimethylaminoethyl-[1,3]- | XTC/DSPC/Cholesterol/PEG-DMG |
| | dioxolane (XTC) | 57.5/7.5/31.5/3.5 |
| | | lipid:siRNA~6:1 |
| LNP06 | 2,2-Dilinoleyl-4-dimethylaminoethyl-[1,3]- | XTC/DSPC/Cholesterol/PEG-DMG |
| | dioxolane (XTC) | 57.5/7.5/31.5/3.5 |
| | | lipid:siRNA~11:1 |
| LNP07 | 2,2-Dilinoleyl-4-dimethylaminoethyl-[1,3]- | XTC/DSPC/Cholesterol/PEG-DMG |
| | dioxolane (XTC) | 60/7.5/31/1.5, |
| | | lipid:siRNA~6:1 |
| LNP08 | 2,2-Dilinoleyl-4-dimethylaminoethyl-[1,3]- | XTC/DSPC/Cholesterol/PEG-DMG |
| | dioxolane (XTC) | 60/7.5/31/1.5, |
| | | lipid:siRNA~11:1 |
| LNP09 | 2,2-Dilinoleyl-4-dimethylaminoethyl-[1,3]- | XTC/DSPC/Cholesterol/PEG-DMG |
| | dioxolane (XTC) | 50/10/38.5/1.5 |
| | | Lipid:siRNA 10:1 |
| LNP10 | (3aR,5s,6aS)-N,N-dimethyl-2,2-di((9Z,12Z)- | ALN100/DSPC/Cholesterol/PEG-DMG |
| | octadeca-9,12-dienyl)tetrahydro-3aH- | 50/10/38.5/1.5 |
| | cyclopenta[d][1,3]dioxol-5-amine (ALN100) | Lipid:siRNA 10:1 |
| LNP11 | (6Z,9Z,28Z,31Z)-heptatriaconta-6,9,28,31- | MC-3/DSPC/Cholesterol/PEG-DMG |
| | tetraen-19-yl 4-(dimethylamino)butanoate | 50/10/38.5/1.5 |
| | (MC3) | Lipid:siRNA 10:1 |
| LNP12 | 1,1′-(2-(4-(2-((2-(bis(2- | Tech G1/DSPC/Cholesterol/PEG-DMG |
| | hydroxydodecyl)amino)ethyl)(2- | 50/10/38.5/1.5 |
| | hydroxydodecyl)amino)ethyl)piperazin-1- | Lipid:siRNA 10:1 |
| | yl)ethylazanediyl)didodecan-2-ol (Tech G1) | |
| LNP13 | XTC | XTC/DSPC/Chol/PEG-DMG |
| | | 50/10/38.5/1.5 |
| | | Lipid:siRNA: 33:1 |
| LNP14 | MC3 | MC3/DSPC/Chol/PEG-DMG |
| | | 40/15/40/5 |
| | | Lipid:siRNA: 11:1 |
| LNP15 | MC3 | MC3/DSPC/Chol/PEG-DSG/GalNAc-PEG-DSG |
| | | 50/10/35/4.5/0.5 |
| | | Lipid:siRNA: 11:1 |
| LNP16 | MC3 | MC3/DSPC/Chol/PEG-DMG |
| | | 50/10/38.5/1.5 |
| | | Lipid:siRNA: 7:1 |
| LNP17 | MC3 | MC3/DSPC/Chol/PEG-DSG |
| | | 50/10/38.5/1.5 |
| | | Lipid:siRNA: 10:1 |
| LNP18 | MC3 | MC3/DSPC/Chol/PEG-DMG |
| | | 50/10/38.5/1.5 |
| | | Lipid:siRNA: 12:1 |
| LNP19 | MC3 | MC3/DSPC/Chol/PEG-DMG |
| | | 50/10/35/5 |
| | | Lipid:siRNA: 8:1 |
| LNP20 | MC3 | MC3/DSPC/Chol/PEG-DPG |
| | | 50/10/38.5/1.5 |
| | | Lipid:siRNA: 10:1 |
| LNP21 | C12-200 | C12-200/DSPC/Chol/PEG-DSG |
| | | 50/10/38.5/1.5 |
| | | Lipid:siRNA: 7:1 |
| LNP22 | XTC | XTC/DSPC/Chol/PEG-DSG |
| | | 50/10/38.5/1.5 |
| | | Lipid:siRNA: 10:1 |

[0487] DSPC: distearoylphosphatidylcholine
[0488] DPPC: dipalmitoylphosphatidylcholine
[0489] PEG-DMG: PEG-didimyristoyl glycerol (C14-PEG, or PEG-C14) (PEG with avg mol wt of 2000)
[0490] PEG-DSG: PEG-distyryl glycerol (C18-PEG, or PEG-C18) (PEG with avg mol wt of 2000)
[0491] PEG-CDMA: PEG-carbamoyl-1,2-dimyristyloxypropylamine (PEG with avg mol wt of 2000)
[0492] SNALP (1,2-Dilinolenyloxy-N,N-dimethylaminopropane (DLinDMA)) comprising formulations are described in International Publication No. WO2009/127060, filed Apr. 15, 2009, which is hereby incorporated by reference.

[0493] XTC comprising formulations are described, e.g., in U.S. Provisional Ser. No. 61/148,366, filed Jan. 29, 2009; U.S. Provisional Ser. No. 61/156,851, filed Mar. 2, 2009; U.S. Provisional Ser. No. filed Jun. 10, 2009; U.S. Provisional Ser. No. 61/228,373, filed Jul. 24, 2009; U.S. Provisional Ser. No. 61/239,686, filed Sep. 3, 2009, and International Application No. PCT/US2010/022614, filed Jan. 29, 2010, which are hereby incorporated by reference.

[0494] MC3 comprising formulations are described, e.g., in U.S. Publication No. 2010/0324120, filed Jun. 10, 2010, the entire contents of which are hereby incorporated by reference.

[0495] ALNY-100 comprising formulations are described, e.g., International patent application number PCT/US09/63933, filed on Nov. 10, 2009, which is hereby incorporated by reference.

[0496] C12-200 comprising formulations are described in U.S. Provisional Ser. No. 61/175,770, filed May 5, 2009 and International Application No. PCT/US10/33777, filed May 5, 2010, which are hereby incorporated by reference.

### Synthesis of Ionizable Cationic Lipids

[0497] Any of the compounds, e.g., cationic lipids and the like, used in the nucleic acid-lipid particles of the invention can be prepared by known organic synthesis techniques, including the methods described in more detail in the Examples. All substituents are as defined below unless indicated otherwise.

[0498] “Alkyl” means a straight chain or branched, noncyclic or cyclic, saturated aliphatic hydrocarbon containing from 1 to 24 carbon atoms. Representative saturated straight chain alkyls include methyl, ethyl, n-propyl, n-butyl, n-pentyl, n-hexyl, and the like; while saturated branched alkyls include isopropyl, sec-butyl, isobutyl, tert-butyl, isopentyl, and the like. Representative saturated cyclic alkyls include cyclopropyl, cyclobutyl, cyclopentyl, cyclohexyl, and the like; while unsaturated cyclic alkyls include cyclopentenyl and cyclohexenyl, and the like.

[0499] “Alkenyl” means an alkyl, as defined above, containing at least one double bond between adjacent carbon atoms. Alkenyls include both cis and trans isomers. Representative straight chain and branched alkenyls include ethylenyl, propylenyl, 1-butenyl, 2-butenyl, isobutylenyl, 1-pentenyl, 2-pentenyl, 3-methyl-1-butenyl, 2-methyl-2-butenyl, 2,3-dimethyl-2-butenyl, and the like.

[0500] “Alkynyl” means any alkyl or alkenyl, as defined above, which additionally contains at least one triple bond between adjacent carbons. Representative straight chain and branched alkynyls include acetylenyl, propynyl, 1-butynyl, 2-butynyl, 1-pentynyl, 2-pentynyl, 3-methyl-1 butynyl, and the like.

[0501] “Acyl” means any alkyl, alkenyl, or alkynyl wherein the carbon at the point of attachment is substituted with an oxo group, as defined below. For example, —C(═O)alkyl, —C(—O)alkenyl, and —C(═O)alkynyl are acyl groups.

[0502] “Heterocycle” means a 5- to 7-membered monocyclic, or 7- to 10-membered bicyclic, heterocyclic ring which is either saturated, unsaturated, or aromatic, and which contains from 1 or 2 heteroatoms independently selected from nitrogen, oxygen and sulfur, and wherein the nitrogen and sulfur heteroatoms can be optionally oxidized, and the nitrogen heteroatom can be optionally quaternized, including bicyclic rings in which any of the above heterocycles are fused to a benzene ring. The heterocycle can be attached via any heteroatom or carbon atom. Heterocycles include heteroaryls as defined below. Heterocycles include morpholinyl, pyrrolidinonyl, pyrrolidinyl, piperidinyl, piperizynyl, hydantoinyl, valerolactamyl, oxiranyl, oxetanyl, tetrahydrofuranyl, tetrahydropyranyl, tetrahydropyridinyl, tetrahydroprimidinyl, tetrahydrothiophenyl, tetrahydrothiopyranyl, tetrahydropyrimidinyl, tetrahydrothiophenyl, tetrahydrothiopyranyl, and the like.

[0503] The terms “optionally substituted alkyl”, “optionally substituted alkenyl”, “optionally substituted alkynyl”, “optionally substituted acyl”, and “optionally substituted heterocycle” means that, when substituted, at least one hydrogen atom is replaced with a substituent. In the case of an oxo substituent (═O) two hydrogen atoms are replaced. In this regard, substituents include oxo, halogen, heterocycle, —CN, —ORx, —NRxRy, —NRxC(═O)Ry, —NRxSO2Ry, —C(—O)Rx, —C(═O)ORx, —C(═O)NRxRy, —SOnRx and —SOnNRxRy, wherein n is 0, 1 or 2, Rx and Ry are the same or different and independently hydrogen, alkyl or heterocycle, and each of said alkyl and heterocycle substituents can be further substituted with one or more of oxo, halogen, —OH, —CN, alkyl, —ORx, heterocycle, —NRxRy, —NRxC(═O)Ry, —NRxSO2Ry, —C(═O)Rx, —C(═O)ORx, —C(═O)NRxRy, —S OnRx and —SOnNRxRy.

[0504] “Halogen” means fluoro, chloro, bromo and iodo.

[0505] In some embodiments, the methods of the invention can require the use of protecting groups. Protecting group methodology is well known to those skilled in the art (see, for example, Protective Groups in Organic Synthesis, Green, T. W. et al., Wiley-Interscience, New York City, 1999). Briefly, protecting groups within the context of this invention are any group that reduces or eliminates unwanted reactivity of a functional group. A protecting group can be added to a functional group to mask its reactivity during certain reactions and then removed to reveal the original functional group. In some embodiments an “alcohol protecting group” is used. An “alcohol protecting group” is any group which decreases or eliminates unwanted reactivity of an alcohol functional group. Protecting groups can be added and removed using techniques well known in the art.

### Synthesis of Formula A

[0506] In some embodiments, nucleic acid-lipid particles of the invention are formulated using a cationic lipid of formula A:

[chemical structure]

where R1 and R2 are independently alkyl, alkenyl or alkynyl, each can be optionally substituted, and R3 and R4 are independently lower alkyl or R3 and R4 can be taken together to form an optionally substituted heterocyclic ring. In some embodiments, the cationic lipid is XTC (2,2-Dilinoleyl-4-dimethylaminoethyl-[1,3]-dioxolane). In general, the lipid of formula A above can be made by the following Reaction Schemes 1 or 2, wherein all substituents are as defined above unless indicated otherwise.

[chemical structure]

Lipid A, where R1 and R2 are independently alkyl, alkenyl or alkynyl, each can be optionally substituted, and R3 and R4 are independently lower alkyl or R3 and R4 can be taken together to form an optionally substituted heterocyclic ring, can be prepared according to Scheme 1. Ketone 1 and bromide 2 can be purchased or prepared according to methods known to those of ordinary skill in the art. Reaction of 1 and 2 yields ketal 3. Treatment of ketal 3 with amine 4 yields lipids of formula A. The lipids of formula A can be converted to the corresponding ammonium salt with an organic salt of formula 5, where X is anion counter ion selected from halogen, hydroxide, phosphate, sulfate, or the like.

[chemical structure]

Alternatively, the ketone 1 starting material can be prepared according to Scheme 2. Grignard reagent 6 and cyanide 7 can be purchased or prepared according to methods known to those of ordinary skill in the art. Reaction of 6 and 7 yields ketone 1. Conversion of ketone 1 to the corresponding lipids of formula A is as described in Scheme 1.

### Synthesis of MC3

[0507] Preparation of DLin-M-C3-DMA (i.e., (6Z,9Z,28Z,31Z)-heptatriaconta-6,9,28,31-tetraen-19-yl 4-(dimethylamino)butanoate) was as follows. A solution of (6Z,9Z,28Z,31Z)-heptatriaconta-6,9,28,31-tetraen-19-ol (0.53 g), 4-N,N-dimethylaminobutyric acid hydrochloride (0.51 g), 4-N,N-dimethylaminopyridine (0.61 g) and 1-ethyl-3-(3-dimethylaminopropyl)carbodiimide hydrochloride (0.53 g) in dichloromethane (5 mL) was stirred at room temperature overnight. The solution was washed with dilute hydrochloric acid followed by dilute aqueous sodium bicarbonate. The organic fractions were dried over anhydrous magnesium sulphate, filtered and the solvent removed on a rotovap. The residue was passed down a silica gel column (20 g) using a 1-5% methanol/dichloromethane elution gradient. Fractions containing the purified product were combined and the solvent removed, yielding a colorless oil (0.54 g). Synthesis of ALNY-100

[0508] Synthesis of ketal 519 [ALNY-100] was performed using the following scheme 3:

[chemical structure]

### Synthesis of 515

[0509] To a stirred suspension of LiAlH4 (3.74 g, 0.09852 mol) in 200 ml anhydrous THF in a two neck RBF (IL), was added a solution of 514 (10 g, 0.04926 mol) in 70 mL of THF slowly at 0° C. under nitrogen atmosphere. After complete addition, reaction mixture was warmed to room temperature and then heated to reflux for 4 h. Progress of the reaction was monitored by TLC. After completion of reaction (by TLC) the mixture was cooled to 0 0C and quenched with careful addition of saturated Nₐ2SO4 solution. Reaction mixture was stirred for 4 h at room temperature and filtered off. Residue was washed well with THF. The filtrate and washings were mixed and diluted with 400 mL dioxane and 26 mL conc. HCl and stirred for 20 minutes at room temperature. The volatilities were stripped off under vacuum to furnish the hydrochloride salt of 515 as a white solid. Yield: 7.12 g 1H-NMR (DMSO, 400 MHZ): δ=9.34 (broad, 2H), 5.68 (s, 2H), 3.74 (m, 1H), 2.66-2.60 (m, 2H), 2.50-2.45 (m, 5H).

### Synthesis of 516

[0510] To a stirred solution of compound 515 in 100 mL dry DCM in a 250 mL two neck RBF, was added NEt3 (37.2 mL, 0.2669 mol) and cooled to 0 0C under nitrogen atmosphere. After a slow addition of N-(benzyloxy-carbonyloxy)-succinimide (20 g, 0.08007 mol) in 50 mL dry DCM, reaction mixture was allowed to warm to room temperature. After completion of the reaction (2-3 h by TLC) mixture was washed successively with IN HCl solution (1×100 mL) and saturated NaHCO₃ solution (1×50 mL). The organic layer was then dried over anhyd. Nₐ2SO4 and the solvent was evaporated to give crude material which was purified by silica gel column chromatography to get 516 as sticky mass. Yield: 11 g (89%). 1H-NMR (CDCl3, 400 MHZ): δ=7.36-7.27 (m, 5H), 5.69 (s, 2H), 5.12 (s, 2H), 4.96 (br., 1H) 2.74 (s, 3H), 2.60 (m, 2H), 2.30-2.25 (m, 2H). LC-MS [M+H]-232.3 (96.94%).

### Synthesis of 517A and 517B

[0511] The cyclopentene 516 (5 g, 0.02164 mol) was dissolved in a solution of 220 mL acetone and water (10:1) in a single neck 500 mL RBF and to it was added N-methyl morpholine-N-oxide (7.6 g, 0.06492 mol) followed by 4.2 mL of 7.6% solution of OsO4 (0.275 g, 0.00108 mol) in tert-butanol at room temperature. After completion of the reaction (˜ 3 h), the mixture was quenched with addition of solid Na2SO3 and resulting mixture was stirred for 1.5 h at room temperature. Reaction mixture was diluted with DCM (300 mL) and washed with water (2×100 mL) followed by saturated NaHCO3(1×50 mL) solution, water (1×30 mL) and finally with brine (1×50 mL). Organic phase was dried over an. Na2SO4 and solvent was removed in vacuum. Silica gel column chromatographic purification of the crude material was afforded a mixture of diastereomers, which were separated by prep HPLC. Yield:-6 g crude 517A-Peak-1 (white solid), 5.13 g (96%). 1H-NMR (DMSO, 400 MHz): δ=7.39-7.31 (m, 5H), 5.04 (s, 2H), 4.78-4.73 (m, 1H), 4.48-4.47 (d, 2H), 3.94-3.93 (m, 2H), 2.71 (s, 3H), 1.72-1.67 (m, 4H). LC-MS-[M+H]-266.3, [M+NH4+]-283.5 present, HPLC-97.86%. Stereochemistry confirmed by X-ray.

### Synthesis of 518

[0512] Using a procedure analogous to that described for the synthesis of compound 505, compound 518 (1.2 g, 41%) was obtained as a colorless oil. 1H-NMR (CDCl3, 400 MHZ): δ=7.35-7.33 (m, 4H), 7.30-7.27 (m, 1H), 5.37-5.27 (m, 8H), 5.12 (s, 2H), 4.75 (m, 1H), 4.58-4.57 (m, 2H), 2.78-2.74 (m, 7H), 2.06-2.00 (m, 8H), 1.96-1.91 (m, 2H), 1.62 (m, 4H), 1.48 (m, 2H), 1.37-1.25(br m, 36H), 0.87 (m, 6H). HPLC-98.65%.

### General Procedure for the Synthesis of Compound 519

[0513] A solution of compound 518 (1 eq) in hexane (15 mL) was added in a drop-wise fashion to an ice-cold solution of LAH in THF (1 M, 2 eq). After complete addition, the mixture was heated at 400C over 0.5 h then cooled again on an ice bath. The mixture was carefully hydrolyzed with saturated aqueous Na2SO4 then filtered through celite and reduced to an oil. Column chromatography provided the pure 519 (1.3 g, 68%) which was obtained as a colorless oil. 13C NMR δ=130.2, 130.1 (×2), 127.9 (×3), 112.3, 79.3, 64.4, 44.7, 38.3, 35.4, 31.5, 29.9 (×2), 29.7, 29.6 (×2), 29.5 (×3), 29.3 (×2), 27.2 (×3), 25.6, 24.5, 23.3, 226, 14.1; Electrospray MS (+ve): Molecular weight for C44H80NO2 (M+H)+Calc. 654.6, Found 654.6.

[0514] Formulations prepared by either the standard or extrusion-free method can be characterized in similar manners. For example, formulations are typically characterized by visual inspection. They should be whitish translucent solutions free from aggregates or sediment. Particle size and particle size distribution of lipid-nanoparticles can be measured by light scattering using, for example, a Malvern Zetasizer Nano ZS (Malvern, USA). Particles should be about 20-300 nm, such as 40-100 nm in size. The particle size distribution should be unimodal. The total dsRNA concentration in the formulation, as well as the entrapped fraction, is estimated using a dye exclusion assay. A sample of the formulated dsRNA can be incubated with an RNA-binding dye, such as Ribogreen (Molecular Probes) in the presence or absence of a formulation disrupting surfactant, e.g., 0.5% Triton-X100. The total dsRNA in the formulation can be determined by the signal from the sample containing the surfactant, relative to a standard curve. The entrapped fraction is determined by subtracting the “free” dsRNA content (as measured by the signal in the absence of surfactant) from the total dsRNA content. Percent entrapped dsRNA is typically >85%. For SNALP formulation, the particle size is at least 30 nm, at least 40 nm, at least 50 nm, at least 60 nm, at least 70 nm, at least 80 nm, at least 90 nm, at least 100 nm, at least 110 nm, and at least 120 nm. The suitable range is typically about at least 50 nm to about at least 110 nm, about at least 60 nm to about at least 100 nm, or about at least 80 nm to about at least 90 nm.

[0515] Compositions and formulations for oral administration include powders or granules, microparticulates, nanoparticulates, suspensions or solutions in water or non-aqueous media, capsules, gel capsules, sachets, tablets or minitablets. Thickeners, flavoring agents, diluents, emulsifiers, dispersing aids or binders can be desirable. In some embodiments, oral formulations are those in which dsRNAs featured in the invention are administered in conjunction with one or more penetration enhancer surfactants and chelators. Suitable surfactants include fatty acids and/or esters or salts thereof, bile acids and/or salts thereof. Suitable bile acids/salts include chenodeoxycholic acid (CDCA) and ursodeoxychenodeoxycholic acid (UDCA), cholic acid, dehydrocholic acid, deoxycholic acid, glucholic acid, glycholic acid, glycodeoxycholic acid, taurocholic acid, taurodeoxycholic acid, sodium tauro-24,25-dihydro-fusidate and sodium glycodihydrofusidate. Suitable fatty acids include arachidonic acid, undecanoic acid, oleic acid, lauric acid, caprylic acid, capric acid, myristic acid, palmitic acid, stearic acid, linoleic acid, linolenic acid, dicaprate, tricaprate, monoolein, dilaurin, glyceryl 1-monocaprate, 1-dodecylazacycloheptan-2-one, an acylcarnitine, an acylcholine, or a monoglyceride, a diglyceride or a pharmaceutically acceptable salt thereof (e.g., sodium). In some embodiments, combinations of penetration enhancers are used, for example, fatty acids/salts in combination with bile acids/salts. One exemplary combination is the sodium salt of lauric acid, capric acid and UDCA. Further penetration enhancers include polyoxyethylene-9-lauryl ether, polyoxyethylene-20-cetyl ether. DsRNAs featured in the invention can be delivered orally, in granular form including sprayed dried particles, or complexed to form micro or nanoparticles. DsRNA complexing agents include poly-amino acids; polyimines; polyacrylates; polyalkylacrylates, polyoxethanes, polyalkylcyanoacrylates; cationized gelatins, albumins, starches, acrylates, polyethyleneglycols (PEG) and starches; polyalkylcyanoacrylates; DEAE-derivatized polyimines, pollulans, celluloses and starches. Suitable complexing agents include chitosan, N-trimethylchitosan, poly-L-lysine, polyhistidine, polyornithine, polyspermines, protamine, polyvinylpyridine, polythiodiethylaminomethylethylene P(TDAE), polyaminostyrene (e.g., p-amino), poly(methylcyanoacrylate), poly(ethylcyanoacrylate), poly(butylcyanoacrylate), poly(isobutylcyanoacrylate), poly(isohexylcynaoacrylate), DEAE-methacrylate, DEAE-hexylacrylate, DEAE-acrylamide, DEAE-albumin and DEAE-dextran, polymethylacrylate, polyhexylacrylate, poly(D,L-lactic acid), poly(DL-lactic-co-glycolic acid (PLGA), alginate, and polyethyleneglycol (PEG). Oral formulations for dsRNAs and their preparation are described in detail in U.S. Pat. No. 6,887,906, US Publn. No. 20030027780, and U.S. Pat. No. 6,747,014, each of which is incorporated herein by reference.

[0516] Compositions and formulations for parenteral, intraparenchymal (into the brain), intrathecal, intraventricular or intrahepatic administration can include sterile aqueous solutions which can also contain buffers, diluents and other suitable additives such as, but not limited to, penetration enhancers, carrier compounds and other pharmaceutically acceptable carriers or excipients.

[0517] Pharmaceutical compositions of the present invention include, but are not limited to, solutions, emulsions, and liposome-containing formulations. These compositions can be generated from a variety of components that include, but are not limited to, preformed liquids, self-emulsifying solids and self-emulsifying semisolids. Particularly preferred are formulations that target the liver when treating hepatic disorders such as hepatic carcinoma.

[0518] The pharmaceutical formulations of the present invention, which can conveniently be presented in unit dosage form, can be prepared according to conventional techniques well known in the pharmaceutical industry. Such techniques include the step of bringing into association the active ingredients with the pharmaceutical carrier(s) or excipient(s). In general, the formulations are prepared by uniformly and intimately bringing into association the active ingredients with liquid carriers or finely divided solid carriers or both, and then, if necessary, shaping the product.

[0519] The compositions of the present invention can be formulated into any of many possible dosage forms such as, but not limited to, tablets, capsules, gel capsules, liquid syrups, soft gels, suppositories, and enemas. The compositions of the present invention can also be formulated as suspensions in aqueous, non-aqueous or mixed media. Aqueous suspensions can further contain substances which increase the viscosity of the suspension including, for example, sodium carboxymethylcellulose, sorbitol and/or dextran. The suspension can also contain stabilizers.

### C. Additional Formulations

i. Emulsions

[0520] The compositions of the present invention can be prepared and formulated as emulsions. Emulsions are typically heterogeneous systems of one liquid dispersed in another in the form of droplets usually exceeding 0.1 μm in diameter (see e.g., Ansel's Pharmaceutical Dosage Forms and Drug Delivery Systems, Allen, LV., Popovich N G., and Ansel H C., 2004, Lippincott Williams & Wilkins (8th ed.), New York, NY; Idson, in Pharmaceutical Dosage Forms, Lieberman, Rieger and Banker (Eds.), 1988 Marchcel Dekker, Inc., New York, N.Y., volume 1, p. 199; Rosoff, in Pharmaceutical Dosage Forms, Lieberman, Rieger and Banker (Eds.), 1988 Marchcel Dekker, Inc., New York, N.Y., Volume 1, p. 245; Block in Pharmaceutical Dosage Forms, Lieberman, Rieger and Banker (Eds.), 1988 Marchcel Dekker, Inc., New York, N. Y., volume 2, p. 335; Higuchi et al., in Remington's Pharmaceutical Sciences, Mack Publishing Co., Easton, Pa., 1985, p. 301). Emulsions are often biphasic systems comprising two immiscible liquid phases intimately mixed and dispersed with each other. In general, emulsions can be of either the water-in-oil (w/o) or the oil-in-water (o/w) variety. When an aqueous phase is finely divided into and dispersed as minute droplets into a bulk oily phase, the resulting composition is called a water-in-oil (w/o) emulsion. Alternatively, when an oily phase is finely divided into and dispersed as minute droplets into a bulk aqueous phase, the resulting composition is called an oil-in-water (o/w) emulsion. Emulsions can contain additional components in addition to the dispersed phases, and the active drug which can be present as a solution in either the aqueous phase, oily phase or itself as a separate phase. Pharmaceutical excipients such as emulsifiers, stabilizers, dyes, and anti-oxidants can also be present in emulsions as needed. Pharmaceutical emulsions can also be multiple emulsions that are comprised of more than two phases such as, for example, in the case of oil-in-water-in-oil (o/w/o) and water-in-oil-in-water (w/o/w) emulsions. Such complex formulations often provide certain advantages that simple binary emulsions do not. Multiple emulsions in which individual oil droplets of an o/w emulsion enclose small water droplets constitute a w/o/w emulsion. Likewise a system of oil droplets enclosed in globules of water stabilized in an oily continuous phase provides an o/w/o emulsion.

[0521] Emulsions are characterized by little or no thermodynamic stability. Often, the dispersed or discontinuous phase of the emulsion is well dispersed into the external or continuous phase and maintained in this form through the means of emulsifiers or the viscosity of the formulation. Either of the phases of the emulsion can be a semisolid or a solid, as is the case of emulsion-style ointment bases and creams. Other means of stabilizing emulsions entail the use of emulsifiers that can be incorporated into either phase of the emulsion. Emulsifiers can broadly be classified into four categories: synthetic surfactants, naturally occurring emulsifiers, absorption bases, and finely dispersed solids (see e.g., Ansel's Pharmaceutical Dosage Forms and Drug Delivery Systems, Allen, LV., Popovich N G., and Ansel H C., 2004, Lippincott Williams & Wilkins (8th ed.), New York, NY; Idson, in Pharmaceutical Dosage Forms, Lieberman, Rieger and Banker (Eds.), 1988 Marchcel Dekker, Inc., New York, N.Y., volume 1, p. 199).

[0522] Synthetic surfactants, also known as surface active agents, have found wide applicability in the formulation of emulsions and have been reviewed in the literature (see e.g., Ansel's Pharmaceutical Dosage Forms and Drug Delivery Systems, Allen, LV., Popovich N G., and Ansel H C., 2004, Lippincott Williams & Wilkins (8th ed.), New York, NY; Rieger, in Pharmaceutical Dosage Forms, Lieberman, Rieger and Banker (Eds.), 1988 Marchcel Dekker, Inc., New York, N.Y., volume 1, p. 285; Idson, in Pharmaceutical Dosage Forms, Lieberman, Rieger and Banker (Eds.), Marcel Dekker, Inc., New York, N.Y., 1988, volume 1, p. 199). Surfactants are typically amphiphilic and comprise a hydrophilic and a hydrophobic portion. The ratio of the hydrophilic to the hydrophobic nature of the surfactant has been termed the hydrophile/lipophile balance (HLB) and is a valuable tool in categorizing and selecting surfactants in the preparation of formulations. Surfactants can be classified into different classes based on the nature of the hydrophilic group: nonionic, anionic, cationic and amphoteric (see e.g., Ansel's Pharmaceutical Dosage Forms and Drug Delivery Systems, Allen, LV., Popovich N G., and Ansel H C., 2004, Lippincott Williams & Wilkins (8th ed.), New York, NY Rieger, in Pharmaceutical Dosage Forms, Lieberman, Rieger and Banker (Eds.), 1988 Marchcel Dekker, Inc., New York, N.Y., volume 1, p. 285).

[0523] Naturally occurring emulsifiers used in emulsion formulations include lanolin, beeswax, phosphatides, lecithin and acacia. Absorption bases possess hydrophilic properties such that they can soak up water to form w/o emulsions yet retain their semisolid consistencies, such as anhydrous lanolin and hydrophilic petrolatum. Finely divided solids have also been used as good emulsifiers especially in combination with surfactants and in viscous preparations. These include polar inorganic solids, such as heavy metal hydroxides, nonswelling clays such as bentonite, attapulgite, hectorite, kaolin, montmorillonite, colloidal aluminum silicate and colloidal magnesium aluminum silicate, pigments and nonpolar solids such as carbon or glyceryl tristearate.

[0524] A large variety of non-emulsifying materials are also included in emulsion formulations and contribute to the properties of emulsions. These include fats, oils, waxes, fatty acids, fatty alcohols, fatty esters, humectants, hydrophilic colloids, preservatives and antioxidants (Block, in Pharmaceutical Dosage Forms, Lieberman, Rieger and Banker (Eds.), 1988 Marchcel Dekker, Inc., New York, N.Y., volume 1, p. 335; Idson, in Pharmaceutical Dosage Forms, Lieberman, Rieger and Banker (Eds.), 1988 Marchcel Dekker, Inc., New York, N.Y., volume 1, p. 199).

[0525] Hydrophilic colloids or hydrocolloids include naturally occurring gums and synthetic polymers such as polysaccharides (for example, acacia, agar, alginic acid, carrageenan, guar gum, karaya gum, and tragacanth), cellulose derivatives (for example, carboxymethylcellulose and carboxypropylcellulose), and synthetic polymers (for example, carbomers, cellulose ethers, and carboxyvinyl polymers). These disperse or swell in water to form colloidal solutions that stabilize emulsions by forming strong interfacial films around the dispersed-phase droplets and by increasing the viscosity of the external phase.

[0526] Since emulsions often contain a number of ingredients such as carbohydrates, proteins, sterols and phosphatides that can readily support the growth of microbes, these formulations often incorporate preservatives. Commonly used preservatives included in emulsion formulations include methyl paraben, propyl paraben, quaternary ammonium salts, benzalkonium chloride, esters of p-hydroxybenzoic acid, and boric acid. Antioxidants are also commonly added to emulsion formulations to prevent deterioration of the formulation. Antioxidants used can be free radical scavengers such as tocopherols, alkyl gallates, butylated hydroxyanisole, butylated hydroxytoluene, or reducing agents such as ascorbic acid and sodium metabisulfite, and antioxidant synergists such as citric acid, tartaric acid, and lecithin.

[0527] The application of emulsion formulations via dermatological, oral and parenteral routes and methods for their manufacture have been reviewed in the literature (see e.g., Ansel's Pharmaceutical Dosage Forms and Drug Delivery Systems, Allen, LV., Popovich N G., and Ansel H C., 2004, Lippincott Williams & Wilkins (8th ed.), New York, NY; Idson, in Pharmaceutical Dosage Forms, Lieberman, Rieger and Banker (Eds.), 1988 Marchcel Dekker, Inc., New York, N.Y., volume 1, p. 199). Emulsion formulations for oral delivery have been very widely used because of ease of formulation, as well as efficacy from an absorption and bioavailability standpoint (see e.g., Ansel's Pharmaceutical Dosage Forms and Drug Delivery Systems, Allen, LV., Popovich N G., and Ansel H C., 2004, Lippincott Williams & Wilkins (8th ed.), New York, NY; Rosoff, in Pharmaceutical Dosage Forms, Lieberman, Rieger and Banker (Eds.), 1988 Marchcel Dekker, Inc., New York, N.Y., volume 1, p. 245; Idson, in Pharmaceutical Dosage Forms, Lieberman, Rieger and Banker (Eds.), 1988 Marchcel Dekker, Inc., New York, N.Y., volume 1, p. 199). Mineral-oil base laxatives, oil-soluble vitamins and high fat nutritive preparations are among the materials that have commonly been administered orally as o/w emulsions.

ii. Microemulsions

[0528] In one embodiment of the present invention, the compositions of iRNAs and nucleic acids are formulated as microemulsions. A microemulsion can be defined as a system of water, oil and amphiphile which is a single optically isotropic and thermodynamically stable liquid solution (see e.g., Ansel's Pharmaceutical Dosage Forms and Drug Delivery Systems, Allen, LV., Popovich N G., and Ansel H C., 2004, Lippincott Williams & Wilkins (8th ed.), New York, NY; Rosoff, in Pharmaceutical Dosage Forms, Lieberman, Rieger and Banker (Eds.), 1988 Marchcel Dekker, Inc., New York, N.Y., volume 1, p. 245). Typically microemulsions are systems that are prepared by first dispersing an oil in an aqueous surfactant solution and then adding a sufficient amount of a fourth component, generally an intermediate chain-length alcohol to form a transparent system. Therefore, microemulsions have also been described as thermodynamically stable, isotropically clear dispersions of two immiscible liquids that are stabilized by interfacial films of surface-active molecules (Leung and Shah, in: Controlled Release of Drugs: Polymers and Aggregate Systems, Rosoff, M., Ed., 1989, VCH Publishers, New York, pages 185-215). Microemulsions commonly are prepared via a combination of three to five components that include oil, water, surfactant, cosurfactant and electrolyte. Whether the microemulsion is of the water-in-oil (w/o) or an oil-in-water (o/w) type is dependent on the properties of the oil and surfactant used and on the structure and geometric packing of the polar heads and hydrocarbon tails of the surfactant molecules (Schott, in Remington's Pharmaceutical Sciences, Mack Publishing Co., Easton, Pa., 1985, p. 271).

[0529] The phenomenological approach utilizing phase diagrams has been extensively studied and has yielded a comprehensive knowledge, to one skilled in the art, of how to formulate microemulsions (see e.g., Ansel's Pharmaceutical Dosage Forms and Drug Delivery Systems, Allen, LV., Popovich N G., and Ansel H C., 2004, Lippincott Williams & Wilkins (8th ed.), New York, NY; Rosoff, in Pharmaceutical Dosage Forms, Lieberman, Rieger and Banker (Eds.), 1988 Marchcel Dekker, Inc., New York, N.Y., volume 1, p. 245; Block, in Pharmaceutical Dosage Forms, Lieberman, Rieger and Banker (Eds.), 1988 Marchcel Dekker, Inc., New York, N.Y., volume 1, p. 335). Compared to conventional emulsions, microemulsions offer the advantage of solubilizing water-insoluble drugs in a formulation of thermodynamically stable droplets that are formed spontaneously.

[0530] Surfactants used in the preparation of microemulsions include, but are not limited to, ionic surfactants, non-ionic surfactants, Brij 96, polyoxyethylene oleyl ethers, polyglycerol fatty acid esters, tetraglycerol monolaurate (ML310), tetraglycerol monooleate (MO310), hexaglycerol monooleate (PO310), hexaglycerol pentaoleate (PO500), decaglycerol monocaprate (MCA750), decaglycerol monooleate (MO750), decaglycerol sequioleate (SO750), decaglycerol decaoleate (DAO750), alone or in combination with cosurfactants. The cosurfactant, usually a short-chain alcohol such as ethanol, 1-propanol, and 1-butanol, serves to increase the interfacial fluidity by penetrating into the surfactant film and consequently creating a disordered film because of the void space generated among surfactant molecules. Microemulsions can, however, be prepared without the use of cosurfactants and alcohol-free self-emulsifying microemulsion systems are known in the art. The aqueous phase can typically be, but is not limited to, water, an aqueous solution of the drug, glycerol, PEG300, PEG400, polyglycerols, propylene glycols, and derivatives of ethylene glycol. The oil phase can include, but is not limited to, materials such as Captex 300, Captex 355, Capmul MCM, fatty acid esters, medium chain (C8-C12) mono, di, and tri-glycerides, polyoxyethylated glyceryl fatty acid esters, fatty alcohols, polyglycolized glycerides, saturated polyglycolized C8-C10 glycerides, vegetable oils and silicone oil.

[0531] Microemulsions are particularly of interest from the standpoint of drug solubilization and the enhanced absorption of drugs. Lipid based microemulsions (both o/w and w/o) have been proposed to enhance the oral bioavailability of drugs, including peptides (see e.g., U.S. Pat. Nos. 6,191,105; 7,063,860; 7,070,802; 7,157,099; Constantinides et al., Pharmaceutical Research, 1994, 11, 1385-1390; Ritschel, Meth. Find. Exp. Clin. Pharmacol., 1993, 13, 205). Microemulsions afford advantages of improved drug solubilization, protection of drug from enzymatic hydrolysis, possible enhancement of drug absorption due to surfactant-induced alterations in membrane fluidity and permeability, ease of preparation, ease of oral administration over solid dosage forms, improved clinical potency, and decreased toxicity (see e.g., U.S. Pat. Nos. 6,191,105; 7,063,860; 7,070,802; 7,157,099; Constantinides et al., Pharmaceutical Research, 1994, 11, 1385; Ho et al., J. Pharm. Sci., 1996, 85, 138-143). Often microemulsions can form spontaneously when their components are brought together at ambient temperature. This can be particularly advantageous when formulating thermolabile drugs, peptides or iRNAs. Microemulsions have also been effective in the transdermal delivery of active components in both cosmetic and pharmaceutical applications. It is expected that the microemulsion compositions and formulations of the present invention will facilitate the increased systemic absorption of iRNAs and nucleic acids from the gastrointestinal tract, as well as improve the local cellular uptake of iRNAs and nucleic acids.

[0532] Microemulsions of the present invention can also contain additional components and additives such as sorbitan monostearate (Grill 3), Labrasol, and penetration enhancers to improve the properties of the formulation and to enhance the absorption of the iRNAs and nucleic acids of the present invention. Penetration enhancers used in the microemulsions of the present invention can be classified as belonging to one of five broad categories—surfactants, fatty acids, bile salts, chelating agents, and non-chelating non-surfactants (Lee et al., Critical Reviews in Therapeutic Drug Carrier Systems, 1991, p. 92). Each of these classes has been discussed above.

iii. Microparticles an RNAi agent of the invention may be incorporated into a particle, e.g., a microparticle. Microparticles can be produced by spray-drying, but may also be produced by other methods including lyophilization, evaporation, fluid bed drying, vacuum drying, or a combination of these techniques.
iv. Penetration Enhancers

[0533] In one embodiment, the present invention employs various penetration enhancers to effect the efficient delivery of nucleic acids, particularly iRNAs, to the skin of animals. Most drugs are present in solution in both ionized and nonionized forms. However, usually only lipid soluble or lipophilic drugs readily cross cell membranes. It has been discovered that even non-lipophilic drugs can cross cell membranes if the membrane to be crossed is treated with a penetration enhancer. In addition to aiding the diffusion of non-lipophilic drugs across cell membranes, penetration enhancers also enhance the permeability of lipophilic drugs.

[0534] Penetration enhancers can be classified as belonging to one of five broad categories, i.e., surfactants, fatty acids, bile salts, chelating agents, and non-chelating non-surfactants (see e.g., Malmsten, M. Surfactants and polymers in drug delivery, Informa Health Care, New York, NY, 2002; Lee et al., Critical Reviews in Therapeutic Drug Carrier Systems, 1991, p.92). Each of the above mentioned classes of penetration enhancers are described below in greater detail.

[0535] Surfactants (or “surface-active agents”) are chemical entities which, when dissolved in an aqueous solution, reduce the surface tension of the solution or the interfacial tension between the aqueous solution and another liquid, with the result that absorption of iRNAs through the mucosa is enhanced. In addition to bile salts and fatty acids, these penetration enhancers include, for example, sodium lauryl sulfate, polyoxyethylene-9-lauryl ether and polyoxyethylene-20-cetyl ether) (see e.g., Malmsten, M. Surfactants and polymers in drug delivery, Informa Health Care, New York, NY, 2002; Lee et al., Critical Reviews in Therapeutic Drug Carrier Systems, 1991, p.92); and perfluorochemical emulsions, such as FC-43. Takahashi et al., J. Pharm. Pharmacol., 1988, 40, 252).

[0536] Various fatty acids and their derivatives which act as penetration enhancers include, for example, oleic acid, lauric acid, capric acid (n-decanoic acid), myristic acid, palmitic acid, stearic acid, linoleic acid, linolenic acid, dicaprate, tricaprate, monoolein (1-monooleoyl-rac-glycerol), dilaurin, caprylic acid, arachidonic acid, glycerol 1-monocaprate, 1-dodecylazacycloheptan-2-one, acylcarnitines, acylcholines, C1-20 alkyl esters thereof (e.g., methyl, isopropyl and t-butyl), and mono- and di-glycerides thereof (i.e., oleate, laurate, caprate, myristate, palmitate, stearate, linoleate, etc.) (see e.g., Touitou, E., et al. Enhancement in Drug Delivery, CRC Press, Danvers, M A, 2006; Lee et al., Critical Reviews in Therapeutic Drug Carrier Systems, 1991, p.92; Muranishi, Critical Reviews in Therapeutic Drug Carrier Systems, 1990, 7, 1-33; El Hariri et al., J. Pharm. Pharmacol., 1992, 44, 651-654).

[0537] The physiological role of bile includes the facilitation of dispersion and absorption of lipids and fat-soluble vitamins (see e.g., Malmsten, M. Surfactants and polymers in drug delivery, Informa Health Care, New York, NY, 2002; Brunton, Chapter 38 in: Goodman & Gilman's The Pharmacological Basis of Therapeutics, 9th Ed., Hardman et al. Eds., McGraw-Hill, New York, 1996, pp. 934-935). Various natural bile salts, and their synthetic derivatives, act as penetration enhancers. Thus the term “bile salts” includes any of the naturally occurring components of bile as well as any of their synthetic derivatives. Suitable bile salts include, for example, cholic acid (or its pharmaceutically acceptable sodium salt, sodium cholate), dehydrocholic acid (sodium dehydrocholate), deoxycholic acid (sodium deoxycholate), glucholic acid (sodium glucholate), glycholic acid (sodium glycocholate), glycodeoxycholic acid (sodium glycodeoxycholate), taurocholic acid (sodium taurocholate), taurodeoxycholic acid (sodium taurodeoxycholate), chenodeoxycholic acid (sodium chenodeoxycholate), ursodeoxycholic acid (UDCA), sodium tauro-24,25-dihydro-fusidate (STDHF), sodium glycodihydrofusidate and polyoxyethylene-9-lauryl ether (POE) (see e.g., Malmsten, M. Surfactants and polymers in drug delivery, Informa Health Care, New York, NY, 2002; Lee et al., Critical Reviews in Therapeutic Drug Carrier Systems, 1991, page 92; Swinyard, Chapter 39 In: Remington's Pharmaceutical Sciences, 18th Ed., Gennaro, ed., Mack Publishing Co., Easton, Pa., 1990, pages 782-783; Muranishi, Critical Reviews in Therapeutic Drug Carrier Systems, 1990, 7, 1-33; Yamamoto et al., J. Pharm. Exp. Ther., 1992, 263, 25; Yamashita et al., J. Pharm. Sci., 1990, 79, 579-583).

[0538] Chelating agents, as used in connection with the present invention, can be defined as compounds that remove metallic ions from solution by forming complexes therewith, with the result that absorption of iRNAs through the mucosa is enhanced. With regards to their use as penetration enhancers in the present invention, chelating agents have the added advantage of also serving as DNase inhibitors, as most characterized DNA nucleases require a divalent metal ion for catalysis and are thus inhibited by chelating agents (Jarrett, J. Chromatogr., 1993, 618, 315-339). Suitable chelating agents include but are not limited to disodium ethylenediaminetetraacetate (EDTA), citric acid, salicylates (e.g., sodium salicylate, 5-methoxysalicylate and homovanilate), N-acyl derivatives of collagen, laureth-9 and N-amino acyl derivatives of beta-diketones (enamines)(see e.g., Katdare, A. et al., Excipient development for pharmaceutical, biotechnology, and drug delivery, CRC Press, Danvers, M A, 2006; Lee et al., Critical Reviews in Therapeutic Drug Carrier Systems, 1991, page 92; Muranishi, Critical Reviews in Therapeutic Drug Carrier Systems, 1990, 7, 1-33; Buur et al., J. Control Rel., 1990, 14, 43-51).

[0539] As used herein, non-chelating non-surfactant penetration enhancing compounds can be defined as compounds that demonstrate insignificant activity as chelating agents or as surfactants but that nonetheless enhance absorption of iRNAs through the alimentary mucosa (see e.g., Muranishi, Critical Reviews in Therapeutic Drug Carrier Systems, 1990, 7, 1-33). This class of penetration enhancers includes, for example, unsaturated cyclic ureas, 1-alkyl- and 1-alkenylazacyclo-alkanone derivatives (Lee et al., Critical Reviews in Therapeutic Drug Carrier Systems, 1991, page 92); and non-steroidal anti-inflammatory agents such as diclofenac sodium, indomethacin and phenylbutazone (Yamashita et al., J. Pharm. Pharmacol., 1987, 39, 621-626). Agents that enhance uptake of iRNAs at the cellular level can also be added to the pharmaceutical and other compositions of the present invention. For example, cationic lipids, such as lipofectin (Junichi et al, U.S. Pat. No. 5,705,188), cationic glycerol derivatives, and polycationic molecules, such as polylysine (Lollo et al., PCT Application WO 97/30731), are also known to enhance the cellular uptake of dsRNAs. Examples of commercially available transfection reagents include, for example Lipofectamine™ (Invitrogen; Carlsbad, CA), Lipofectamine 2000™ (Invitrogen; Carlsbad, CA), 293fectin™ (Invitrogen; Carlsbad, CA), Cellfectin™ (Invitrogen; Carlsbad, CA), DMRIE-C™ (Invitrogen; Carlsbad, CA), FreeStyle™ MAX (Invitrogen; Carlsbad, CA), Lipofectamine™ 2000 CD (Invitrogen; Carlsbad, CA), Lipofectamine™ (Invitrogen; Carlsbad, CA), RNAiMAX (Invitrogen; Carlsbad, CA), Oligofectamine™ (Invitrogen; Carlsbad, CA), Optifect™ (Invitrogen; Carlsbad, CA), X-tremeGENE Q2 Transfection Reagent (Roche; Grenzacherstrasse, Switzerland), DOTAP Liposomal Transfection Reagent (Grenzacherstrasse, Switzerland), DOSPER Liposomal Transfection Reagent (Grenzacherstrasse, Switzerland), or Fugene (Grenzacherstrasse, Switzerland), Transfectam® Reagent (Promega; Madison, WI), TransFast™ Transfection Reagent (Promega; Madison, WI), Tfx™-20 Reagent (Promega; Madison, WI), Tfx™-50 Reagent (Promega; Madison, WI), DreamFect™ (OZ Biosciences; Marseille, France), EcoTransfect (OZ Biosciences; Marseille, France), TransPassa DI Transfection Reagent (New England Biolabs; Ipswich, MA, USA), LyoVec™/LipoGen™ (Invitrogen; San Diego, CA, USA), PerFectin Transfection Reagent (Genlantis; San Diego, CA, USA), NeuroPORTER Transfection Reagent (Genlantis; San Diego, CA, USA), GenePORTER Transfection reagent (Genlantis; San Diego, CA, USA), GenePORTER 2 Transfection reagent (Genlantis; San Diego, CA, USA), Cytofectin Transfection Reagent (Genlantis; San Diego, CA, USA), BaculoPORTER Transfection Reagent (Genlantis; San Diego, CA, USA), TroganPORTER™ transfection Reagent (Genlantis; San Diego, CA, USA), RiboFect (Bioline; Taunton, MA, USA), PlasFect (Bioline; Taunton, MA, USA), UniFECTOR (B-Bridge International; Mountain View, CA, USA), SureFECTOR (B-Bridge International; Mountain View, CA, USA), or HiFect™ (B-Bridge International, Mountain View, CA, USA), among others.

[0540] Other agents can be utilized to enhance the penetration of the administered nucleic acids, including glycols such as ethylene glycol and propylene glycol, pyrrols such as 2-pyrrol, azones, and terpenes such as limonene and menthone.

v. Carriers

[0541] Certain compositions of the present invention also incorporate carrier compounds in the formulation. As used herein, “carrier compound” or “carrier” can refer to a nucleic acid, or analog thereof, which is inert (i.e., does not possess biological activity per se) but is recognized as a nucleic acid by in vivo processes that reduce the bioavailability of a nucleic acid having biological activity by, for example, degrading the biologically active nucleic acid or promoting its removal from circulation. The coadministration of a nucleic acid and a carrier compound, typically with an excess of the latter substance, can result in a substantial reduction of the amount of nucleic acid recovered in the liver, kidney or other extracirculatory reservoirs, presumably due to competition between the carrier compound and the nucleic acid for a common receptor. For example, the recovery of a partially phosphorothioate dsRNA in hepatic tissue can be reduced when it is coadministered with polyinosinic acid, dextran sulfate, polycytidic acid or 4-acetamido-4′isothiocyano-stilbene-2,2′-disulfonic acid (Miyao et al., DsRNA Res. Dev., 1995, 5, 115-121; Takakura et al., DsRNA & Nucl. Acid Drug Dev., 1996, 6, 177-183.

vi. Excipients

[0542] In contrast to a carrier compound, a “pharmaceutical carrier” or “excipient” is a pharmaceutically acceptable solvent, suspending agent or any other pharmacologically inert vehicle for delivering one or more nucleic acids to an animal. The excipient can be liquid or solid and is selected, with the planned manner of administration in mind, so as to provide for the desired bulk, consistency, etc., when combined with a nucleic acid and the other components of a given pharmaceutical composition. Typical pharmaceutical carriers include, but are not limited to, binding agents (e.g., pregelatinized maize starch, polyvinylpyrrolidone or hydroxypropyl methylcellulose, etc.); fillers (e.g., lactose and other sugars, microcrystalline cellulose, pectin, gelatin, calcium sulfate, ethyl cellulose, polyacrylates or calcium hydrogen phosphate, etc.); lubricants (e.g., magnesium stearate, talc, silica, colloidal silicon dioxide, stearic acid, metallic stearates, hydrogenated vegetable oils, corn starch, polyethylene glycols, sodium benzoate, sodium acetate, etc.); disintegrants (e.g., starch, sodium starch glycolate, etc.); and wetting agents (e.g., sodium lauryl sulphate, etc).

[0543] Pharmaceutically acceptable organic or inorganic excipients suitable for non-parenteral administration which do not deleteriously react with nucleic acids can also be used to formulate the compositions of the present invention. Suitable pharmaceutically acceptable carriers include, but are not limited to, water, salt solutions, alcohols, polyethylene glycols, gelatin, lactose, amylose, magnesium stearate, talc, silicic acid, viscous paraffin, hydroxymethylcellulose, polyvinylpyrrolidone and the like.

[0544] Formulations for topical administration of nucleic acids can include sterile and non-sterile aqueous solutions, non-aqueous solutions in common solvents such as alcohols, or solutions of the nucleic acids in liquid or solid oil bases. The solutions can also contain buffers, diluents and other suitable additives. Pharmaceutically acceptable organic or inorganic excipients suitable for non-parenteral administration which do not deleteriously react with nucleic acids can be used.

[0545] Suitable pharmaceutically acceptable excipients include, but are not limited to, water, salt solutions, alcohol, polyethylene glycols, gelatin, lactose, amylose, magnesium stearate, talc, silicic acid, viscous paraffin, hydroxymethylcellulose, polyvinylpyrrolidone and the like.

vii. Other Components

[0546] The compositions of the present invention can additionally contain other adjunct components conventionally found in pharmaceutical compositions, at their art-established usage levels. Thus, for example, the compositions can contain additional, compatible, pharmaceutically-active materials such as, for example, antipruritics, astringents, local anesthetics or anti-inflammatory agents, or can contain additional materials useful in physically formulating various dosage forms of the compositions of the present invention, such as dyes, flavoring agents, preservatives, antioxidants, opacifiers, thickening agents and stabilizers. However, such materials, when added, should not unduly interfere with the biological activities of the components of the compositions of the present invention. The formulations can be sterilized and, if desired, mixed with auxiliary agents, e.g., lubricants, preservatives, stabilizers, wetting agents, emulsifiers, salts for influencing osmotic pressure, buffers, colorings, flavorings and/or aromatic substances and the like which do not deleteriously interact with the nucleic acid(s) of the formulation.

[0547] Aqueous suspensions can contain substances which increase the viscosity of the suspension including, for example, sodium carboxymethylcellulose, sorbitol and/or dextran. The suspension can also contain stabilizers.

[0548] In some embodiments, pharmaceutical compositions featured in the invention include (a) one or more iRNA compounds and (b) one or more agents which function by a non-RNAi mechanism and which are useful in treating a hemolytic disorder. Examples of such agents include, but are not limited to an anti-inflammatory agent, anti-steatosis agent, anti-viral, and/or anti-fibrosis agent. In addition, other substances commonly used to protect the liver, such as silymarin, can also be used in conjunction with the iRNAs described herein. Other agents useful for treating liver diseases include telbivudine, entecavir, and protease inhibitors such as telaprevir and other disclosed, for example, in Tung et al., U.S. Application Publication Nos. 2005/0148548, 2004/0167116, and 2003/0144217; and in Hale et al., U.S. Application Publication No. 2004/0127488.

[0549] Toxicity and therapeutic efficacy of such compounds can be determined by standard pharmaceutical procedures in cell cultures or experimental animals, e.g., for determining the LD50 (the dose lethal to 50% of the population) and the ED50 (the dose therapeutically effective in 50% of the population). The dose ratio between toxic and therapeutic effects is the therapeutic index and it can be expressed as the ratio LD50/ED50. Compounds that exhibit high therapeutic indices are preferred.

[0550] The data obtained from cell culture assays and animal studies can be used in formulating a range of dosage for use in humans. The dosage of compositions featured herein in the invention lies generally within a range of circulating concentrations that include the ED50 with little or no toxicity. The dosage can vary within this range depending upon the dosage form employed and the route of administration utilized. For any compound used in the methods featured in the invention, the therapeutically effective dose can be estimated initially from cell culture assays. A dose can be formulated in animal models to achieve a circulating plasma concentration range of the compound or, when appropriate, of the polypeptide product of a target sequence (e.g., achieving a decreased concentration of the polypeptide) that includes the IC50 (i.e., the concentration of the test compound which achieves a half-maximal inhibition of symptoms) as determined in cell culture. Such information can be used to more accurately determine useful doses in humans. Levels in plasma can be measured, for example, by high performance liquid chromatography.

[0551] In addition to their administration, as discussed above, the iRNAs featured in the invention can be administered in combination with other known agents effective in treatment of pathological processes mediated by C5 expression. In any event, the administering physician can adjust the amount and timing of iRNA administration on the basis of results observed using standard measures of efficacy known in the art or described herein.

### VI. Methods For Inhibiting C5 Expression

[0552] The present invention provides methods of inhibiting expression of C5 in a cell. The methods include contacting a cell with an RNAi agent, e.g., a double stranded RNAi agent, in an amount effective to inhibit expression of the C5 in the cell, thereby inhibiting expression of the C5 in the cell.

[0553] Contacting of a cell with a double stranded RNAi agent may be done in vitro or in vivo. Contacting a cell in vivo with the RNAi agent includes contacting a cell or group of cells within a subject, e.g., a human subject, with the RNAi agent. Combinations of in vitro and in vivo methods of contacting are also possible. Contacting may be direct or indirect, as discussed above. Furthermore, contacting a cell may be accomplished via a targeting ligand, including any ligand described herein or known in the art. In preferred embodiments, the targeting ligand is a carbohydrate moiety, e.g., a GalNAc₃ ligand, or any other ligand that directs the RNAi agent to a site of interest, e.g., the liver of a subject.

[0554] The term “inhibiting,” as used herein, is used interchangeably with “reducing,” “silencing,” “downregulating” and other similar terms, and includes any level of inhibition.

[0555] The phrase “inhibiting expression of a C5” is intended to refer to inhibition of expression of any C5 gene (such as, e.g., a mouse C5 gene, a rat C5 gene, a monkey C5 gene, or a human C5 gene) as well as variants or mutants of a C5 gene. Thus, the C5 gene may be a wild-type C5 gene, a mutant C5 gene, or a transgenic C5 gene in the context of a genetically manipulated cell, group of cells, or organism.

[0556] “Inhibiting expression of a C5 gene” includes any level of inhibition of a C5 gene, e.g., at least partial suppression of the expression of a C5 gene. The expression of the C5 gene may be assessed based on the level, or the change in the level, of any variable associated with C5 gene expression, e.g., C5 mRNA level, C5 protein level, or for example, CH₅₀ activity as a measure of total hemolytic complement, AH₅₀ to measure the hemolytic activity of the alternate pathway of complement, and/or lactate dehydrogenase (LDH) levels as a measure of intravascular hemolysis, and/or hemoglobin levels. Levels of C5a, C5b, and soluble C5b-9 complex may also be measured to assess C5 expression. This level may be assessed in an individual cell or in a group of cells, including, for example, a sample derived from a subject.

[0557] Inhibition may be assessed by a decrease in an absolute or relative level of one or more variables that are associated with C5 expression compared with a control level. The control level may be any type of control level that is utilized in the art, e.g., a pre-dose baseline level, or a level determined from a similar subject, cell, or sample that is untreated or treated with a control (such as, e.g., buffer only control or inactive agent control).

[0558] In some embodiments of the methods of the invention, expression of a C5 gene is inhibited by at least about 5%, at least about 10%, at least about 15%, at least about 20%, at least about 25%, at least about 30%, at least about 35%, at least about 40%, at least about 45%, at least about 50%, at least about 55%, at least about 60%, at least about 65%, at least about 70%, at least about 75%, at least about 80%, at least about 85%, at least about 90%, at least about 91%, at least about 92%, at least about 93%, at least about 94%. at least about 95%, at least about 96%, at least about 97%, at least about 98%, or at least about 99%.

[0559] Inhibition of the expression of a C5 gene may be manifested by a reduction of the amount of mRNA expressed by a first cell or group of cells (such cells may be present, for example, in a sample derived from a subject) in which a C5 gene is transcribed and which has or have been treated (e.g., by contacting the cell or cells with an RNAi agent of the invention, or by administering an RNAi agent of the invention to a subject in which the cells are or were present) such that the expression of a C5 gene is inhibited, as compared to a second cell or group of cells substantially identical to the first cell or group of cells but which has not or have not been so treated (control cell(s)). In preferred embodiments, the inhibition is assessed by expressing the level of mRNA in treated cells as a percentage of the level of mRNA in control cells, using the following formula:

$$\frac{( mRNA in control cells ) - ( mRNA in treated cells )}{( mRNA in control cells )} •100 \%$$

[0560] Alternatively, inhibition of the expression of a C5 gene may be assessed in terms of a reduction of a parameter that is functionally linked to C5 gene expression, e.g., C5 protein expression, hepcidin gene or protein expression, or iron levels in tissues or serum. C5 gene silencing may be determined in any cell expressing C5, either constitutively or by genomic engineering, and by any assay known in the art. The liver is the major site of C5 expression. Other significant sites of expression include the kidneys and the uterus.

[0561] Inhibition of the expression of a C5 protein may be manifested by a reduction in the level of the C5 protein that is expressed by a cell or group of cells (e.g., the level of protein expressed in a sample derived from a subject). As explained above for the assessment of mRNA suppression, the inhibition of protein expression levels in a treated cell or group of cells may similarly be expressed as a percentage of the level of protein in a control cell or group of cells.

[0562] A control cell or group of cells that may be used to assess the inhibition of the expression of a C5 gene includes a cell or group of cells that has not yet been contacted with an RNAi agent of the invention. For example, the control cell or group of cells may be derived from an individual subject (e.g., a human or animal subject) prior to treatment of the subject with an RNAi agent.

[0563] The level of C5 mRNA that is expressed by a cell or group of cells may be determined using any method known in the art for assessing mRNA expression. In one embodiment, the level of expression of C5 in a sample is determined by detecting a transcribed polynucleotide, or portion thereof, e.g., mRNA of the C5 gene. RNA may be extracted from cells using RNA extraction techniques including, for example, using acid phenol/guanidine isothiocyanate extraction (RNAzol B; Biogenesis), RNeasy RNA preparation kits (Qiagen) or PAXgene (PreAnalytix, Switzerland). Typical assay formats utilizing ribonucleic acid hybridization include nuclear run-on assays, RT-PCR, RNase protection assays (Melton et al., Nuc. Acids Res. 12:7035), Northern blotting, in situ hybridization, and microarray analysis.

[0564] In one embodiment, the level of expression of C5 is determined using a nucleic acid probe. The term “probe”, as used herein, refers to any molecule that is capable of selectively binding to a specific C5. Probes can be synthesized by one of skill in the art, or derived from appropriate biological preparations. Probes may be specifically designed to be labeled. Examples of molecules that can be utilized as probes include, but are not limited to, RNA, DNA, proteins, antibodies, and organic molecules.

[0565] Isolated mRNA can be used in hybridization or amplification assays that include, but are not limited to, Southern or Northern analyses, polymerase chain reaction (PCR) analyses and probe arrays. One method for the determination of mRNA levels involves contacting the isolated mRNA with a nucleic acid molecule (probe) that can hybridize to C5 mRNA. In one embodiment, the mRNA is immobilized on a solid surface and contacted with a probe, for example by running the isolated mRNA on an agarose gel and transferring the mRNA from the gel to a membrane, such as nitrocellulose. In an alternative embodiment, the probe(s) are immobilized on a solid surface and the mRNA is contacted with the probe(s), for example, in an Affymetrix gene chip array. A skilled artisan can readily adapt known mRNA detection methods for use in determining the level of C5 mRNA.

[0566] An alternative method for determining the level of expression of C5 in a sample involves the process of nucleic acid amplification and/or reverse transcriptase (to prepare cDNA) of for example mRNA in the sample, e.g., by RT-PCR (the experimental embodiment set forth in Mullis, 1987, U.S. Pat. No. 4,683,202), ligase chain reaction (Barany (1991) Proc. Natl. Acad. Sci. USA 88:189-193), self sustained sequence replication (Guatelli et al. (1990) Proc. Natl. Acad. Sci. USA 87:1874-1878), transcriptional amplification system (Kwoh et al. (1989) Proc. Natl. Acad. Sci. USA 86:1173-1177), Q-Beta Replicase (Lizardi et al. (1988) Bio/Technology 6:1197), rolling circle replication (Lizardi et al., U.S. Pat. No. 5,854,033) or any other nucleic acid amplification method, followed by the detection of the amplified molecules using techniques well known to those of skill in the art. These detection schemes are especially useful for the detection of nucleic acid molecules if such molecules are present in very low numbers. In particular aspects of the invention, the level of expression of C5 is determined by quantitative fluorogenic RT-PCR (i.e., the TaqMan™ System).

[0567] The expression levels of C5 mRNA may be monitored using a membrane blot (such as used in hybridization analysis such as Northern, Southern, dot, and the like), or microwells, sample tubes, gels, beads or fibers (or any solid support comprising bound nucleic acids). See U.S. Pat. Nos. 5,770,722, 5,874,219, 5,744,305, 5,677,195 and 5,445,934, which are incorporated herein by reference. The determination of C5 expression level may also comprise using nucleic acid probes in solution.

[0568] In preferred embodiments, the level of mRNA expression is assessed using branched DNA (bDNA) assays or real time PCR (qPCR). The use of these methods is described and exemplified in the Examples presented herein.

[0569] The level of C5 protein expression may be determined using any method known in the art for the measurement of protein levels. Such methods include, for example, electrophoresis, capillary electrophoresis, high performance liquid chromatography (HPLC), thin layer chromatography (TLC), hyperdiffusion chromatography, fluid or gel precipitin reactions, absorption spectroscopy, a colorimetric assays, spectrophotometric assays, flow cytometry, immunodiffusion (single or double), immunoelectrophoresis, Western blotting, radioimmunoassay (RIA), enzyme-linked immunosorbent assays (ELISAs), immunofluorescent assays, electrochemiluminescence assays, and the like.

[0570] The term “sample” as used herein refers to a collection of similar fluids, cells, or tissues isolated from a subject, as well as fluids, cells, or tissues present within a subject. Examples of biological fluids include blood, serum and serosal fluids, plasma, lymph, urine, cerebrospinal fluid, saliva, ocular fluids, and the like. Tissue samples may include samples from tissues, organs or localized regions. For example, samples may be derived from particular organs, parts of organs, or fluids or cells within those organs. In certain embodiments, samples may be derived from the liver (e.g., whole liver or certain segments of liver or certain types of cells in the liver, such as, e.g., hepatocytes). In preferred embodiments, a “sample derived from a subject” refers to blood or plasma drawn from the subject. In further embodiments, a “sample derived from a subject” refers to liver tissue derived from the subject.

[0571] In some embodiments of the methods of the invention, the RNAi agent is administered to a subject such that the RNAi agent is delivered to a specific site within the subject. The inhibition of expression of C5 may be assessed using measurements of the level or change in the level of C5 mRNA or C5 protein in a sample derived from fluid or tissue from the specific site within the subject. In preferred embodiments, the site is sthe liver. The site may also be a subsection or subgroup of cells from any one of the aforementioned sites. The site may also include cells that express a particular type of receptor.

[0572] The phrase “contacting a cell with an RNAi agent,” such as a dsRNA, as used herein, includes contacting a cell by any possible means. Contacting a cell with an RNAi agent includes contacting a cell in vitro with the iRNA or contacting a cell in vivo with the iRNA. The contacting may be done directly or indirectly. Thus, for example, the RNAi agent may be put into physical contact with the cell by the individual performing the method, or alternatively, the RNAi agent may be put into a situation that will permit or cause it to subsequently come into contact with the cell.

[0573] Contacting a cell in vitro may be done, for example, by incubating the cell with the RNAi agent. Contacting a cell in vivo may be done, for example, by injecting the RNAi agent into or near the tissue where the cell is located, or by injecting the RNAi agent into another area, e.g., the bloodstream or the subcutaneous space, such that the agent will subsequently reach the tissue where the cell to be contacted is located. For example, the RNAi agent may contain and/or be coupled to a ligand, e.g., GalNAc₃, that directs the RNAi agent to a site of interest, e.g., the liver. Combinations of in vitro and in vivo methods of contacting are also possible. For example, a cell may also be contacted in vitro with an RNAi agent and subsequently transplanted into a subject. In one embodiment, contacting a cell with an iRNA includes “introducing” or “delivering the iRNA into the cell” by facilitating or effecting uptake or absorption into the cell. Absorption or uptake of an iRNA can occur through unaided diffusive or active cellular processes, or by auxiliary agents or devices. Introducing an iRNA into a cell may be in vitro and/or in vivo. For example, for in vivo introduction, iRNA can be injected into a tissue site or administered systemically. In vivo delivery can also be done by a beta-glucan delivery system, such as those described in U.S. Pat. Nos. 5,032,401 and 5,607,677, and U.S. Publication No. 2005/0281781, the entire contents of which are hereby incorporated herein by reference. In vitro introduction into a cell includes methods known in the art such as electroporation and lipofection. Further approaches are described herein below and/or are known in the art.

### VII. Methods for Treating or Preventing a Complement Component C5-Associated Disorder

[0574] The present invention also provides therapeutic and prophylactic methods which include administering to a subject having a complement component C5-associated disease, e.g., PNH, aHUS, neuromyelitis optica (NMO), or myasthenia gravis, an iRNA agent, pharmaceutical compositions comprising an iRNA agent, or vector comprising an iRNA of the invention. In some aspects of the invention, the methods further include administering to the subject an additional therapeutic agent, such as an anti-complement component C5 antibody, or antigen-binding fragment thereof (e.g., eculizumab).

[0575] In one aspect, the present invention provides methods of treating a subject having a disorder that would benefit from reduction in C5 expression, e.g., a complement component C5-associated disease, e.g., PNH, aHUS, neuromyelitis optica (NMO), or myasthenia gravis. The treatment methods (and uses) of the invention include administering to the subject, e.g., a human, a therapeutically effective amount of an iRNA agent targeting a C5 gene or a pharmaceutical composition comprising an iRNA agent targeting a C5 gene, thereby treating the subject having a disorder that would benefit from reduction in C5 expression.

[0576] In another aspect, the present invention provides methods of treating a subject having a disorder that would benefit from reduction in C5 expression, e.g., a complement component C5-associated disease, e.g., PNH, aHUS, neuromyelitis optica (NMO), or myasthenia gravis, which include administering to the subject, e.g., a human, a therapeutically effective amount of an iRNA agent targeting a C5 gene or a pharmaceutical composition comprising an iRNA agent targeting a C5 gene, and an additional therapeutic agent, such as an anti-complement component C5 antibody, or antigen-binding fragment thereof (e.g., eculizumab), thereby treating the subject having a disorder that would benefit from reduction in C5 expression.

[0577] In one aspect, the invention provides methods of preventing at least one symptom in a subject having a disorder that would benefit from reduction in C5 expression, e.g., a complement component C5-associated disease, e.g., PNH, aHUS, neuromyelitis optica (NMO), or myasthenia gravis. The methods include administering to the subject a prohpylactically effective amount of the iRNA agent, e.g., dsRNA, or vector of the invention, thereby preventing at least one symptom in the subject having a disorder that would benefit from reduction in C5 expression. For example, the invention provides methods for preventing hemolysis in a subject suffering from a disorder that would benefit from reduction in C5 expression, e.g., a complement component C5-associated disease, e.g., PNH, aHUS, neuromyelitis optica (NMO), or myasthenia gravis.

[0578] In another aspect, the invention provides methods of preventing at least one symptom in a subject having a disorder that would benefit from reduction in C5 expression, e.g., a complement component C5-associated disease, e.g., PNH, aHUS, neuromyelitis optica (NMO), or myasthenia gravis. The methods include administering to the subject a prohpylactically effective amount of the iRNA agent, e.g., dsRNA, or vector of the invention, and an additional therapeutic agent, such as an anti-complement component C5 antibody, or antigen-binding fragment thereof (e.g., eculizumab), thereby preventing at least one symptom in the subject having a disorder that would benefit from reduction in C5 expression.

[0579] “Therapeutically effective amount,” as used herein, is intended to include the amount of an RNAi agent or anti-complement component C5 antibody, or antigen-binding fragment thereof (e.g., eculizumab), that, when administered to a subject having a complement component C5-associated disease, is sufficient to effect treatment of the disease (e.g., by diminishing, ameliorating or maintaining the existing disease or one or more symptoms of disease). The “therapeutically effective amount” may vary depending on the RNAi agent or antibody, or antigen-binding fragment thereof, how the agent is administered, the disease and its severity and the history, age, weight, family history, genetic makeup, the types of preceding or concomitant treatments, if any, and other individual characteristics of the subject to be treated.

[0580] “Prophylactically effective amount,” as used herein, is intended to include the amount of an iRNA agent or anti-complement component C5 antibody, or antigen-binding fragment thereof (e.g., eculizumab), that, when administered to a subject having a complement component C5-associate disease but not yet (or currently) experiencing or displaying symptoms of the disease, and/or a subject at risk of developing a complement component C5-associated disease, e.g., a subject having a graft and/or transplant, e.g., a sensitized or allogenic recipient, a subject having sepsis, and/or a subject having a myocardial infarction, is sufficient to prevent or ameliorate the disease or one or more symptoms of the disease. Ameliorating the disease includes slowing the course of the disease or reducing the severity of later-developing disease. The “prophylactically effective amount” may vary depending on the iRNA agent or anti-complement component C5 antibody, or antigen-binding fragment thereof, how the agent or anti-complement component C5 antibody, or antigen-binding fragment thereof, is administered, the degree of risk of disease, and the history, age, weight, family history, genetic makeup, the types of preceding or concomitant treatments, if any, and other individual characteristics of the patient to be treated.

[0581] A “therapeutically effective amount” or “prophylactically effective amount” also includes an amount of an RNAi agent or anti-complement component C5 antibody, or antigen-binding fragment thereof (e.g., eculizumab), that produces some desired local or systemic effect at a reasonable benefit/risk ratio applicable to any treatment. iRNA agents employed in the methods of the present invention may be administered in a sufficient amount to produce a reasonable benefit/risk ratio applicable to such treatment.

[0582] In another aspect, the present invention provides uses of a therapeutically effective amount of an iRNA agent of the invention for treating a subject, e.g., a subject that would benefit from a reduction and/or inhibition of C5 expression.

[0583] In another aspect, the present invention provides uses of a therapeutically effective amount of an iRNA agent of the invention and an additional therapeutic agent, such as an anti-complement component C5 antibody, or antigen-binding fragment thereof (e.g., eculizumab), for treating a subject, e.g., a subject that would benefit from a reduction and/or inhibition of C5 expression.

[0584] In yet another aspect, the present invention provides use of an iRNA agent, e.g., a dsRNA, of the invention targeting a C5 gene or a pharmaceutical composition comprising an iRNA agent targeting a C5 gene in the manufacture of a medicament for treating a subject, e.g., a subject that would benefit from a reduction and/or inhibition of C5 expression, such as a subject having a disorder that would benefit from reduction in C5 expression, e.g., a complement component C5-associated disease, e.g., PNH, aHUS, neuromyelitis optica (NMO), or myasthenia gravis.

[0585] In another aspect, the present invention provides uses of an iRNA agent, e.g., a dsRNA, of the invention targeting a C5 gene or a pharmaceutical composition comprising an iRNA agent targeting a C5 gene in the manufacture of a medicament for use in combination with an additional therapeutic agent, such as an anti-complement component C5 antibody, or antigen-binding fragment thereof (e.g., eculizumab), for treating a subject, e.g., a subject that would benefit from a reduction and/or inhibition of C5 expression, e.g., a complement component C5-associated disease, e.g., PNH, aHUS, neuromyelitis optica (NMO), or myasthenia gravis.

[0586] In another aspect, the invention provides uses of an iRNA, e.g., a dsRNA, of the invention for preventing at least one symptom in a subject suffering from a disorder that would benefit from a reduction and/or inhibition of C5 expression, such as a complement component C5-associated disease, e.g., PNH, aHUS, neuromyelitis optica (NMO), or myasthenia gravis. In yet another aspect, the invention provides uses of an iRNA agent, e.g., a dsRNA, of the invention, and an additional therapeutic agent, such as an anti-complement component C5 antibody, or antigen-binding fragment thereof (e.g., eculizumab), for preventing at least one symptom in a subject suffering from a disorder that would benefit from a reduction and/or inhibition of C5 expression, such as a complement component C5-associated disease, e.g., PNH, aHUS, neuromyelitis optica (NMO), or myasthenia gravis.

[0587] In a further aspect, the present invention provides uses of an iRNA agent of the invention in the manufacture of a medicament for preventing at least one symptom in a subject suffering from a disorder that would benefit from a reduction and/or inhibition of C5 expression, such as a a complement component C5-associated disease, e.g., PNH, aHUS, neuromyelitis optica (NMO), or myasthenia gravis.

[0588] In a further aspect, the present invention provides uses of an iRNA agent of the invention in the manufacture of a medicament for use in combination with an additional therapeutic agent, such as an anti-complement component C5 antibody, or antigen-binding fragment thereof (e.g., eculizumab), for preventing at least one symptom in a subject suffering from a disorder that would benefit from a reduction and/or inhibition of C5 expression, such as a a complement component C5-associated disease, e.g., PNH, aHUS, neuromyelitis optica (NMO), or myasthenia gravis.

[0589] In one embodiment, an iRNA agent targeting C5 is administered to a subject having a complement component C5-associated disease such that C5 levels, e.g., in a cell, tissue, blood, urine or other tissue or fluid of the subject are reduced by at least about 10%, 11%, 12%, 13%, 14%, 15%, 16%, 17%, 18%, 19%, 20%, 21%, 22%, 23%, 24%, 25%, 26%, 27%, 28%, 29%, 30%, 31%, 32%, 33%, 34%, 35%, 36%, 37%, 38%, 39%, 40%, 41%, 42%, 43%, 44%, 45%, 46%, 47%, 48%, 49%, 50%, 51%, 52%, 53%, 54%, 55%, 56%, 57%, 58%, 59%, 60%, 61%, 62%, 62%, 64%, 65%, 66%, 67%, 68%, 69%, 70%, 71%, 72%, 73%, 74%, 75%, 76%, 77%, 78%, 79%, 80%, 81%, 82%, 83%, 84%, 85%, 86%, 87%, 88%, 89%, 90%, 91%, 92%, 93%, 94%, 95%, 96%, 97%, 98%, or at least about 99% or more and, subsequently, an additional therapeutic (as described below) is administered to the subject.

[0590] The additional therapeutic may be an anti-complement component C5 antibody, or antigen-binding fragment or derivative thereof. In one embodiment, the anti-complement component C5 antibody is eculizumab (SOLIRIS®), or antigen-binding fragment or derivative thereof. Eculizumab is a humanized monoclonal IgG2/4, kappa light chain antibody that specifically binds complement component C5 with high affinity and inhibits cleavage of C5 to C5a and C5b, thereby inhibiting the generation of the terminal complement complex C5b-9. Eculizumab is described in U.S. Pat. No. 6,355,245, the entire contents of which are incorporated herein by reference.

[0591] The methods of the invention comprising administration of an iRNA agent of the invention and eculizumab to a subject may further comprise administration of a meningococcal vaccine to the subject.

[0592] The additional therapeutic, e.g., eculizumab and/or a meningococcal vaccine, may be administered to the subject at the same time as the iRNA agent targeting C5 or at a different time.

[0593] Moreover, the additional therapeutic, e.g., eculizumab, may be administered to the subject in the same formulation as the iRNA agent targeting C5 or in a different formulation as the iRNA agent targeting C5.

[0594] In one embodiment, a dsRNA agent is administered to the subject before the anti-complement component C5 antibody, or antigen-binding fragment thereof, is administered to the subject. In one embodiment, the dsRNA agent is administered to the subject first for a period of time sufficient to reduce the levels of complement component C5 in the subject.

[0595] Eculizumab dosage regimens are described in, for example, the product insert for eculizumab (SOLIRISR) and in U.S. Patent Application No. 2012/0225056, the entire contents of each of which are incorporated herein by reference. In exemplary methods of the invention for treating a complement component C5-associated disease, e.g., PNH, aHUS, neuromyelitis optica (NMO), or myasthenia gravis, an iRNA agent targeting C5 is administered (e.g., subcutaneously) to the subject first, such that the C5 levels in the subject are reduced (e.g., by at least about 20%, 21%, 22%, 23%, 24%, 25%, 26%, 27%, 28%, 29%, 30%, 31%, 32%, 33%, 34%, 35%, 36%, 37%, 38%, 39%, 40%, 41%, 42%, 43%, 44%, 45%, 46%, 47%, 48%, 49%, 50%, 51%, 52%, 53%, 54%, 55%, 56%, 57%, 58%, 59%, 60%, 61%, 62%, 62%, 64%, 65%, 66%, 67%, 68%, 69%, 70%, 71%, 72%, 73%, 74%, 75%, 76%, 77%, 78%, 79%, 80%, 81%, 82%, 83%, 84%, 85%, 86%, 87%, 88%, 89%, 90%, 91%, 92%, 93%, 94%, 95%, 96%, 97%, 98%, or at least about 99% or more) and subsequently eculizumab is administered at doses lower than the ones described in the product insert for SOLIRISR. For example, eculizumab may be administered to the subject weekly at a dose less than about 600 mg for 4 weeks followed by a fifth dose at about one week later of less than about 900 mg, followed by a dose less than about 900 mg about every two weeks thereafter. Eculizumab may also be administered to the subject weekly at a dose less than about 900 mg for 4 weeks followed by a fifth dose at about one week later of less than about 1200 mg, followed by a dose less than about 1200 mg about every two weeks thereafter. If the subject is less than 18 years of age, eculizumab may be administered to the subject weekly at a dose less than about 900 mg for 4 weeks followed by a fifth dose at about one week later of less than about 1200 mg, followed by a dose less than about 1200 mg about every two weeks thereafter; or if the subject is less than 18 years of age, eculizumab may be administered to the subject weekly at a dose less than about 600 mg for 2 weeks followed by a third dose at about one week later of less than about 900 mg, followed by a dose less than about 900 mg about every two weeks thereafter; or if the subject is less than 18 years of age, eculizumab may be administered to the subject weekly at a dose less than about 600 mg for 2 weeks followed by a third dose at about one week later of less than about 600 mg, followed by a dose less than about 600 mg about every two weeks thereafter; or if the subject is less than 18 years of age, eculizumab may be administered to the subject weekly at a dose less than about 600 mg for 1 week followed by a second dose at about one week later of less than about 300 mg, followed by a dose less than about 300 mg about every two weeks thereafter; or if the subject is less than 18 years of age, eculizumab may be administered to the subject weekly at a dose less than about 300 mg for 1 week followed by a second dose at about one week later of less than about 300 mg, followed by a dose less than about 300 mg about every two weeks thereafter. If the subject is receiving plasmapheresis or plasma exchange, eculizumab may be administered to the subject at a dose less than about 300 mg (e.g., if the most recent does of eculizumab was about 300 mg) or less than about 600 mg (e.g., if the most recent does of eculizumab was about 600 mg or more). If the subject is receiving plasma infusion, eculizumab may be administered to the subject at a dose less than about 300 mg (e.g., if the most recent does of eculizumab was about 300 mg or more). The lower doses of eculizumab allow for either subcutaneous or intravenous administration of eculizumab.

[0596] In the combination therapies of the present invention comprising eculizumab, the effective amount of eculizumab to treat the subject may be reduced.

[0597] In one embodiment of the combination therapies of the present invention comprising eculizumab, eculizumab may be administered to the subject, e.g., subcutaneously, at a dose of about 0.01 mg/kg to about 10 mg/kg, or about 5 mg/kg to about 10 mg/kg, or about 0.5 mg/kg to about 15 mg/kg. For example, eculizumab may be administered to the subject, e.g., subcutaneously, at a dose of 0.5 mg/kg, 1 mg/kg, 1.5 mg/kg, 2 mg/kg, 2.5 mg/kg, 3 mg/kg, 3.5 mg/kg, 4 mg/kg, 4.5 mg/kg, 5 mg/kg, 5.5 mg/kg, 6 mg/kg, 6.5 mg/kg, 7 mg/kg, 7.5 mg/kg, 8 mg/kg, 8.5 mg/kg, 9 mg/kg, 9.5 mg/kg, 10 mg/kg, 10.5 mg/kg, 11 mg/kg, 11.5 mg/kg, 12 mg/kg, 12.5 mg/kg, 13 mg/kg, 13.5 mg/kg, 14 mg/kg, 14.5 mg/kg, or 15 mg/kg.

[0598] In one embodiment of the combination therapies of the present invention comprising eculizumab, the lactate dehydrogenase (LDH) serum levels in the treated subject are less than about 1.5 times the upper limit of normal range.

[0599] The methods and uses of the invention include administering a composition described herein such that expression of the target C5 gene is decreased, such as for about 1, 2, 3, 4, 5, 6, 7, 8, 12, 16, 18, 24, 28, 32, 36, 40, 44, 48, 52, 56, 60, 64, 68, 72, 76, or about 80 hours. In one embodiment, expression of the target C5 gene is decreased for an extended duration, e.g., at least about two, three, four, five, six, seven days or more, e.g., about one week, two weeks, three weeks, or about four weeks or longer.

[0600] Administration of the dsRNA according to the methods and uses of the invention may result in a reduction of the severity, signs, symptoms, and/or markers of such diseases or disorders in a patient with a complement component C5-associated disease. By “reduction” in this context is meant a statistically significant decrease in such level. The reduction can be, for example, at least about 5%, 10%, 15%, 20%, 25%, 30%, 35%, 40%, 45%, 50%, 55%, 60%, 65%, 70%, 75%, 80%, 85%, 90%, 95%, or about 100%.

[0601] Efficacy of treatment or prevention of disease can be assessed, for example by measuring disease progression, disease remission, symptom severity, reduction in pain, quality of life, dose of a medication required to sustain a treatment effect, level of a disease marker or any other measurable parameter appropriate for a given disease being treated or targeted for prevention. It is well within the ability of one skilled in the art to monitor efficacy of treatment or prevention by measuring any one of such parameters, or any combination of parameters. For example, efficacy of treatment of a hemolytic disorder may be assessed, for example, by periodic monitoring of LDH and CH₅₀ levels. Comparisons of the later readings with the initial readings provide a physician an indication of whether the treatment is effective. It is well within the ability of one skilled in the art to monitor efficacy of treatment or prevention by measuring any one of such parameters, or any combination of parameters. In connection with the administration of an iRNA targeting C5 or pharmaceutical composition thereof, “effective against” a complement component C5-associated disease indicates that administration in a clinically appropriate manner results in a beneficial effect for at least a statistically significant fraction of patients, such as improvement of symptoms, a cure, a reduction in disease, extension of life, improvement in quality of life, or other effect generally recognized as positive by medical doctors familiar with treating a complement component C5-associated disease and the related causes.

[0602] A treatment or preventive effect is evident when there is a statistically significant improvement in one or more parameters of disease status, or by a failure to worsen or to develop symptoms where they would otherwise be anticipated. As an example, a favorable change of at least 10% in a measurable parameter of disease, and preferably at least 20%, 30%, 40%, 50% or more can be indicative of effective treatment. Efficacy for a given iRNA drug or formulation of that drug can also be judged using an experimental animal model for the given disease as known in the art. When using an experimental animal model, efficacy of treatment is evidenced when a statistically significant reduction in a marker or symptom is observed.

[0603] Alternatively, the efficacy can be measured by a reduction in the severity of disease as determined by one skilled in the art of diagnosis based on a clinically accepted disease severity grading scale, as but one example the Rheumatoid Arthritis Severity Scale (RASS). Any positive change resulting in e.g., lessening of severity of disease measured using the appropriate scale, represents adequate treatment using an iRNA or iRNA formulation as described herein.

[0604] Subjects can be administered a therapeutic amount of iRNA, such as about 0.01 mg/kg, 0.02 mg/kg, 0.03 mg/kg, 0.04 mg/kg, 0.05 mg/kg, 0.1 mg/kg, 0.15 mg/kg, 0.2 mg/kg, 0.25 mg/kg, 0.3 mg/kg, 0.35 mg/kg, 0.4 mg/kg, 0.45 mg/kg, 0.5 mg/kg, 0.55 mg/kg, 0.6 mg/kg, 0.65 mg/kg, 0.7 mg/kg, 0.75 mg/kg, 0.8 mg/kg, 0.85 mg/kg, 0.9 mg/kg, 0.95 mg/kg, 1.0 mg/kg, 1.1 mg/kg, 1.2 mg/kg, 1.3 mg/kg, 1.4 mg/kg, 1.5 mg/kg, 1.6 mg/kg, 1.7 mg/kg, 1.8 mg/kg, 1.9 mg/kg, 2.0 mg/kg, 2.1 mg/kg, 2.2 mg/kg, 2.3 mg/kg, 2.4 mg/kg, 2.5 mg/kg dsRNA, 2.6 mg/kg dsRNA, 2.7 mg/kg dsRNA, 2.8 mg/kg dsRNA, 2.9 mg/kg dsRNA, 3.0 mg/kg dsRNA, 3.1 mg/kg dsRNA, 3.2 mg/kg dsRNA, 3.3 mg/kg dsRNA, 3.4 mg/kg dsRNA, 3.5 mg/kg dsRNA, 3.6 mg/kg dsRNA, 3.7 mg/kg dsRNA, 3.8 mg/kg dsRNA, 3.9 mg/kg dsRNA, 4.0 mg/kg dsRNA, 4.1 mg/kg dsRNA, 4.2 mg/kg dsRNA, 4.3 mg/kg dsRNA, 4.4 mg/kg dsRNA, 4.5 mg/kg dsRNA, 4.6 mg/kg dsRNA, 4.7 mg/kg dsRNA, 4.8 mg/kg dsRNA, 4.9 mg/kg dsRNA, 5.0 mg/kg dsRNA, 5.1 mg/kg dsRNA, 5.2 mg/kg dsRNA, 5.3 mg/kg dsRNA, 5.4 mg/kg dsRNA, 5.5 mg/kg dsRNA, 5.6 mg/kg dsRNA, 5.7 mg/kg dsRNA, 5.8 mg/kg dsRNA, 5.9 mg/kg dsRNA, 6.0 mg/kg dsRNA, 6.1 mg/kg dsRNA, 6.2 mg/kg dsRNA, 6.3 mg/kg dsRNA, 6.4 mg/kg dsRNA, 6.5 mg/kg dsRNA, 6.6 mg/kg dsRNA, 6.7 mg/kg dsRNA, 6.8 mg/kg dsRNA, 6.9 mg/kg dsRNA, 7.0 mg/kg dsRNA, 7.1 mg/kg dsRNA, 7.2 mg/kg dsRNA, 7.3 mg/kg dsRNA, 7.4 mg/kg dsRNA, 7.5 mg/kg dsRNA, 7.6 mg/kg dsRNA, 7.7 mg/kg dsRNA, 7.8 mg/kg dsRNA, 7.9 mg/kg dsRNA, 8.0 mg/kg dsRNA, 8.1 mg/kg dsRNA, 8.2 mg/kg dsRNA, 8.3 mg/kg dsRNA, 8.4 mg/kg dsRNA, 8.5 mg/kg dsRNA, 8.6 mg/kg dsRNA, 8.7 mg/kg dsRNA, 8.8 mg/kg dsRNA, 8.9 mg/kg dsRNA, 9.0 mg/kg dsRNA, 9.1 mg/kg dsRNA, 9.2 mg/kg dsRNA, 9.3 mg/kg dsRNA, 9.4 mg/kg dsRNA, 9.5 mg/kg dsRNA, 9.6 mg/kg dsRNA, 9.7 mg/kg dsRNA, 9.8 mg/kg dsRNA, 9.9 mg/kg dsRNA, 9.0 mg/kg dsRNA, 10 mg/kg dsRNA, 15 mg/kg dsRNA, 20 mg/kg dsRNA, 25 mg/kg dsRNA, 30 mg/kg dsRNA, 35 mg/kg dsRNA, 40 mg/kg dsRNA, 45 mg/kg dsRNA, or about 50 mg/kg dsRNA. Values and ranges intermediate to the recited values are also intended to be part of this invention.

[0605] In certain embodiments, for example, when a composition of the invention comprises a dsRNA as described herein and a lipid, subjects can be administered a therapeutic amount of iRNA, such as about 0.01 mg/kg to about 5 mg/kg, about 0.01 mg/kg to about 10 mg/kg, about 0.05 mg/kg to about 5 mg/kg, about 0.05 mg/kg to about 10 mg/kg, about 0.1 mg/kg to about 5 mg/kg, about 0.1 mg/kg to about 10 mg/kg, about 0.2 mg/kg to about 5 mg/kg, about 0.2 mg/kg to about 10 mg/kg, about 0.3 mg/kg to about 5 mg/kg, about 0.3 mg/kg to about 10 mg/kg, about 0.4 mg/kg to about 5 mg/kg, about 0.4 mg/kg to about 10 mg/kg, about 0.5 mg/kg to about 5 mg/kg, about 0.5 mg/kg to about 10 mg/kg, about 1 mg/kg to about 5 mg/kg, about 1 mg/kg to about 10 mg/kg, about 1.5 mg/kg to about 5 mg/kg, about 1.5 mg/kg to about 10 mg/kg, about 2 mg/kg to about 2.5 mg/kg, about 2 mg/kg to about 10 mg/kg, about 3 mg/kg to about 5 mg/kg, about 3 mg/kg to about 10 mg/kg, about 3.5 mg/kg to about 5 mg/kg, about 4 mg/kg to about 5 mg/kg, about 4.5 mg/kg to about 5 mg/kg, about 4 mg/kg to about 10 mg/kg, about 4.5 mg/kg to about 10 mg/kg, about 5 mg/kg to about 10 mg/kg, about 5.5 mg/kg to about 10 mg/kg, about 6 mg/kg to about 10 mg/kg, about 6.5 mg/kg to about 10 mg/kg, about 7 mg/kg to about 10 mg/kg, about 7.5 mg/kg to about 10 mg/kg, about 8 mg/kg to about 10 mg/kg, about 8.5 mg/kg to about 10 mg/kg, about 9 mg/kg to about 10 mg/kg, or about 9.5 mg/kg to about 10 mg/kg. Values and ranges intermediate to the recited values are also intended to be part of this invention.

[0606] For example, the dsRNA may be administered at a dose of about 0.1, 0.2, 0.3, 0.4, 0.5, 0.6, 0.7, 0.8, 0.9, 1, 1.1, 1.2, 1.3, 1.4, 1.5, 1.6, 1.7, 1.8, 1.9, 2, 2.1, 2.2, 2.3, 2.4, 2.5, 2.6, 2.7, 2.8, 2.9, 3, 3.1, 3.2, 3.3, 3.4, 3.5, 3.6, 3.7, 3.8, 3.9, 4, 4.1, 4.2, 4.3, 4.4, 4.5, 4.6, 4.7, 4.8, 4.9, 5, 5.1, 5.2, 5.3, 5.4, 5.5, 5.6, 5.7, 5.8, 5.9, 6, 6.1, 6.2, 6.3, 6.4, 6.5, 6.6, 6.7, 6.8, 6.9, 7, 7.1, 7.2, 7.3, 7.4, 7.5, 7.6, 7.7, 7.8, 7.9, 8, 8.1, 8.2, 8.3, 8.4, 8.5, 8.6, 8.7, 8.8, 8.9, 9, 9.1, 9.2, 9.3, 9.4, 9.5, 9.6, 9.7, 9.8, 9.9, or about 10 mg/kg. Values and ranges intermediate to the recited values are also intended to be part of this invention.

[0607] In other embodiments, for example, when a composition of the invention comprises a dsRNA as described herein and an N-acetylgalactosamine, subjects can be administered a therapeutic amount of iRNA, such as a dose of about 0.1 to about 50 mg/kg, about 0.25 to about 50 mg/kg, about 0.5 to about 50 mg/kg, about 0.75 to about 50 mg/kg, about 1 to about 50 mg/mg, about 1.5 to about 50 mg/kb, about 2 to about 50 mg/kg, about 2.5 to about 50 mg/kg, about 3 to about 50 mg/kg, about 3.5 to about 50 mg/kg, about 4 to about 50 mg/kg, about 4.5 to about 50 mg/kg, about 5 to about 50 mg/kg, about 7.5 to about 50 mg/kg, about 10 to about 50 mg/kg, about 15 to about 50 mg/kg, about 20 to about 50 mg/kg, about 20 to about 50 mg/kg, about 25 to about 50 mg/kg, about 25 to about 50 mg/kg, about 30 to about 50 mg/kg, about 35 to about 50 mg/kg, about 40 to about 50 mg/kg, about 45 to about 50 mg/kg, about 0.1 to about 45 mg/kg, about 0.25 to about 45 mg/kg, about 0.5 to about 45 mg/kg, about 0.75 to about 45 mg/kg, about 1 to about 45 mg/mg, about 1.5 to about 45 mg/kb, about 2 to about 45 mg/kg, about 2.5 to about 45 mg/kg, about 3 to about 45 mg/kg, about 3.5 to about 45 mg/kg, about 4 to about 45 mg/kg, about 4.5 to about 45 mg/kg, about 5 to about 45 mg/kg, about 7.5 to about 45 mg/kg, about 10 to about 45 mg/kg, about 15 to about 45 mg/kg, about 20 to about 45 mg/kg, about 20 to about 45 mg/kg, about 25 to about 45 mg/kg, about 25 to about 45 mg/kg, about 30 to about 45 mg/kg, about 35 to about 45 mg/kg, about 40 to about 45 mg/kg, about 0.1 to about 40 mg/kg, about 0.25 to about 40 mg/kg, about 0.5 to about 40 mg/kg, about 0.75 to about 40 mg/kg, about 1 to about 40 mg/mg, about 1.5 to about 40 mg/kb, about 2 to about 40 mg/kg, about 2.5 to about 40 mg/kg, about 3 to about 40 mg/kg, about 3.5 to about 40 mg/kg, about 4 to about 40 mg/kg, about 4.5 to about 40 mg/kg, about 5 to about 40 mg/kg, about 7.5 to about 40 mg/kg, about 10 to about 40 mg/kg, about 15 to about 40 mg/kg, about 20 to about 40 mg/kg, about 20 to about 40 mg/kg, about 25 to about 40 mg/kg, about 25 to about 40 mg/kg, about 30 to about 40 mg/kg, about 35 to about 40 mg/kg, about 0.1 to about 30 mg/kg, about 0.25 to about 30 mg/kg, about 0.5 to about 30 mg/kg, about 0.75 to about 30 mg/kg, about 1 to about 30 mg/mg, about 1.5 to about 30 mg/kb, about 2 to about 30 mg/kg, about 2.5 to about 30 mg/kg, about 3 to about 30 mg/kg, about 3.5 to about 30 mg/kg, about 4 to about 30 mg/kg, about 4.5 to about 30 mg/kg, about 5 to about 30 mg/kg, about 7.5 to about 30 mg/kg, about 10 to about 30 mg/kg, about 15 to about 30 mg/kg, about 20 to about 30 mg/kg, about 20 to about 30 mg/kg, about 25 to about 30 mg/kg, about 0.1 to about 20 mg/kg, about 0.25 to about 20 mg/kg, about 0.5 to about 20 mg/kg, about 0.75 to about 20 mg/kg, about 1 to about 20 mg/mg, about 1.5 to about 20 mg/kb, about 2 to about 20 mg/kg, about 2.5 to about 20 mg/kg, about 3 to about 20 mg/kg, about 3.5 to about 20 mg/kg, about 4 to about 20 mg/kg, about 4.5 to about 20 mg/kg, about 5 to about 20 mg/kg, about 7.5 to about 20 mg/kg, about 10 to about 20 mg/kg, or about 15 to about 20 mg/kg. In one embodiment, when a composition of the invention comprises a dsRNA as described herein and an N-acetylgalactosamine, subjects can be administered a therapeutic amount of about 10 to about 30 mg/kg of dsRNA. Values and ranges intermediate to the recited values are also intended to be part of this invention.

[0608] For example, subjects can be administered a therapeutic amount of iRNA, such as about 0.1, 0.2, 0.3, 0.4, 0.5, 0.6, 0.7, 0.8, 0.9, 1, 1.1, 1.2, 1.3, 1.4, 1.5, 1.6, 1.7, 1.8, 1.9, 2, 2.1, 2.2, 2.3, 2.4, 2.5, 2.6, 2.7, 2.8, 2.9, 3, 3.1, 3.2, 3.3, 3.4, 3.5, 3.6, 3.7, 3.8, 3.9, 4, 4.1, 4.2, 4.3, 4.4, 4.5, 4.6, 4.7, 4.8, 4.9, 5, 5.1, 5.2, 5.3, 5.4, 5.5, 5.6, 5.7, 5.8, 5.9, 6, 6.1, 6.2, 6.3, 6.4, 6.5, 6.6, 6.7, 6.8, 6.9, 7, 7.1, 7.2, 7.3, 7.4, 7.5, 7.6, 7.7, 7.8, 7.9, 8, 8.1, 8.2, 8.3, 8.4, 8.5, 8.6, 8.7, 8.8, 8.9, 9, 9.1, 9.2, 9.3, 9.4, 9.5, 9.6, 9.7, 9.8, 9.9, 10, 10.5, 11, 11.5, 12, 12.5, 13, 13.5, 14, 14.5, 15, 15.5, 16, 16.5, 17, 17.5, 18, 18.5, 19, 19.5, 20, 20.5, 21, 21.5, 22, 22.5, 23, 23.5, 24, 24.5, 25, 25.5, 26, 26.5, 27, 27.5, 28, 28.5, 29, 29.5, 30, 31, 32, 33, 34, 34, 35, 36, 37, 38, 39, 40, 41, 42, 43, 44, 45, 46, 47, 48, 49, or about 50 mg/kg. Values and ranges intermediate to the recited values are also intended to be part of this invention.

[0609] In some embodiments, the RNAi agent is administered as a fixed dose of between about 25 mg to about 900 mg, e.g., between about 25 mg to about 850 mg, between about 25 mg to about 500 mg, between about 25 mg to about 400 mg, between about 25 mg to about 300 mg, between about 50 mg to about 850 mg, between about 50 mg to about 500 mg, between about 50 mg to about 400 mg, between about 50 mg to about 300 mg, between about 100 mg to about 850 mg, between about 100 mg to about 500 mg, between about 100 mg to about 400 mg, between about 100 mg to about 300 mg, between about 200 mg to about 850 mg, between about 200 mg to about 500 mg, between about 200 mg to about 400 mg, between about 200 mg to about 300 mg, between about 100 mg to about 800 mg, between about 100 mg to about 750 mg, between about 100 mg to about 700 mg, between about 100 mg to about 650 mg, between about 100 mg to about 600 mg, between about 100 mg to about 550 mg, between about 100 mg to about 500 mg, between about 200 mg to about 850 mg, between about 200 mg to about 800 mg, between about 200 mg to about 750 mg, between about 200 mg to about 700 mg, between about 200 mg to about 650 mg, between about 200 mg to about 600 mg, between about 200 mg to about 550 mg, between about 200 mg to about 500 mg, between about 300 mg to about 850 mg, between about 300 mg to about 800 mg, between about 300 mg to about 750 mg, between about 300 mg to about 700 mg, between about 300 mg to about 650 mg, between about 300 mg to about 600 mg, between about 300 mg to about 550 mg, between about 300 mg to about 500 mg, between about 400 mg to about 850 mg, between about 400 mg to about 800 mg, between about 400 mg to about 750 mg, between about 400 mg to about 700 mg, between about 400 mg to about 650 mg, between about 400 mg to about 600 mg, between about 400 mg to about 550 mg, or between about 400 mg to about 500 mg.

[0610] In some embodiments, the RNAi agent is administered as a fixed dose of about 25 mg, about 50 mg, about 75 mg, about 100 mg, about 125 mg, about 150 mg, about 175 mg, 200 mg, about 225 mg, about 250 mg, about 275 mg, about 300 mg, about 325 mg, about 350 mg, about 375 mg, about 400 mg, about 425 mg, about 450 mg, about 475 mg, about 500 mg, about 525 mg, about 550 mg, about 575 mg, about 600 mg, about 625 mg, about 650 mg, about 675 mg, about 700 mg, about 725 mg, about 750 mg, about 775 mg, about 800 mg, about 825 mg, about 850 mg, about 875 mg, or about 900 mg.

[0611] The iRNA can be administered by intravenous infusion over a period of time, such as over a 5, 6, 7, 8, 9, 10, 11, 12, 13, 14, 15, 16, 17, 18, 19, 20, 21, 22, 23, 24, or about a 25 minute period. The administration may be repeated, for example, on a regular basis, such as weekly, biweekly (i.e., every two weeks) for one month, two months, three months, four months or longer. After an initial treatment regimen, the treatments can be administered on a less frequent basis. For example, after administration weekly or biweekly for three months, administration can be repeated once per month, for six months or a year or longer.

[0612] Administration of the iRNA can reduce C5 levels, e.g., in a cell, tissue, blood, urine or other compartment of the patient by at least about 5%, 6%, 7%, 8%, 9%, 10%, 11%, 12%, 13%, 14%, 15%, 16%, 17%, 18%, 19%, 20%, 21%, 22%, 23%, 24%, 25%, 26%, 27%, 28%, 29%, 30%, 31%, 32%, 33%, 34%, 35%, 36%, 37%, 38%, 39%, 40%, 41%, 42%, 43%, 44%, 45%, 46%, 47%, 48%, 49%, 50%, 51%, 52%, 53%, 54%, 55%, 56%, 57%, 58%, 59%, 60%, 61%, 62%, 63%, 64%, 65%, 66%, 67%, 68%, 69%, 70%, 71%, 72%, 73%, 74%, 75%, 76%, 77%, 78%, 79%, 80%, 81%, 82%, 83%, 84%, 85%, 86%, 87%, 88%, 89%, 90%, 91%, 92%, 93%, 94%, 95%, 96%, 97%, 98%, or at least about 99% or more.

[0613] Before administration of a full dose of the iRNA, patients can be administered a smaller dose, such as a 5% infusion, and monitored for adverse effects, such as an allergic reaction. In another example, the patient can be monitored for unwanted immunostimulatory effects, such as increased cytokine (e.g., TNF-alpha or INF-alpha) levels.

[0614] Owing to the inhibitory effects on C5 expression, a composition according to the invention or a pharmaceutical composition prepared therefrom can enhance the quality of life.

[0615] An iRNA of the invention may be administered in “naked” form, or as a “free iRNA.” A naked iRNA is administered in the absence of a pharmaceutical composition. The naked iRNA may be in a suitable buffer solution. The buffer solution may comprise acetate, citrate, prolamine, carbonate, or phosphate, or any combination thereof. In one embodiment, the buffer solution is phosphate buffered saline (PBS). The pH and osmolarity of the buffer solution containing the iRNA can be adjusted such that it is suitable for administering to a subject.

[0616] Alternatively, an iRNA of the invention may be administered as a pharmaceutical composition, such as a dsRNA liposomal formulation.

[0617] Subjects that would benefit from a reduction and/or inhibition of C5gene expression are those having a complement component C5-associated disease or disorder as described herein. In one embodiment, a subject having a complement component C5-associated disease has paroxysmal nocturnal hemoglobinuria (PNH). In another embodiment, a subject having a complement component C5-associated disease has asthma. In another embodiment, a subject having a complement component C5-associated disease has rheumatoid arthritis. In yet another embodiment, a subject having a complement component C5-associated disease has systemic lupus erythmatosis. In one embodiment, a subject having a complement component C5-associated disease has glomerulonephritis. In another embodiment, a subject having a complement component C5-associated disease has psoriasis. In yet another embodiment, a subject having a complement component C5-associated disease has dermatomyositis bullous pemphigoid. In one embodiment, a subject having a complement component C5-associated disease has atypical hemolytic uremic syndrome. In another embodiment, a subject having a complement component C5-associated disease has Shiga toxin E. coli-related hemolytic uremic syndrome. In another embodiment, a subject having a complement component C5-associated disease has myasthenia gravis. In yet another embodiment, a subject having a complement component C5-associated disease has neuromyelitis optica. In one embodiment, a subject having a complement component C5-associated disease has dense deposit disease. In one embodiment, a subject having a complement component C5-associated disease has C3 neuropathy. In another embodiment, a subject having a complement component C5-associated disease has age-related macular degeneration. In another embodiment, a subject having a complement component C5-associated disease has cold agglutinin disease. In one embodiment, a subject having a complement component C5-associated disease has anti-neutrophil cytoplasmic antibody-associated vasculitis. In another embodiment, a subject having a complement component C5-associated disease has humoral and vascular transplant rejection. In one embodiment, a subject having a complement component C5-associated disease has graft dysfunction. In one embodiment, a subject having a complement component C5-associated disease has had a myocardial infarction. In another embodiment, a subject having a complement component C5-associated disease is a sensitized recipient of a transplant. In yet another embodiment, a subject having a complement component C5-associated disease has sepsis.

[0618] In one embodiment, a subject having a complement component C5-associated disease, e.g., PNH, aHUS, neuromyelitis optica (NMO), or myasthenia gravis is an incomplete responder or non-responder to anti-complement component C5 antibody (e.g., eculizumab) therapy. For example, an incomplete responder or non-responder may be transfusion dependent due to chronic persistent extravascular hemolysis. The subject may be CD55 deficient. A “non-responder” to anti-complement component C5 antibody (e.g., eculizumab) therapy is a subject failing at least to have a hematologic response after 6 to 8 weeks of therapy, e.g., a subject that remains transfusion dependent. In one embodiment, an incomplete responder or non-responder to anti-complement component C5 antibody (e.g., eculizumab) therapy is a subject who is receiving a label dose of eculizumab and who is either experiencing ongoing uncontrolled intravascular hemolysis resulting in LDH>1.5×ULN or one or more of the following: any clinical PNH symptoms (e.g., fatigue, abdominal pain, dyspnea, dysphagia or rectile dysfunction); remains transfusion dependent; remains anemic with HGB<10 g/dL; develops a major vascular event (e.g., thrombosis).

[0619] Treatment of a subject that would benefit from a reduction and/or inhibition of C5 gene expression includes therapeutic and prophylactic (e.g., the subject is to undergo sensitized (or allogenic) transplant surgery) treatment.

[0620] The invention further provides methods and uses of an iRNA agent or a pharmaceutical composition thereof (including methods and uses of an iRNA agent or a pharmaceutical composition comprising an iRNA agent and an anti-complement component C5 antibody, or antigen-binding fragment thereof) for treating a subject that would benefit from reduction and/or inhibition of C5 expression, e.g., a subject having a complement component C5-associated disease, in combination with other pharmaceuticals and/or other therapeutic methods, e.g., with known pharmaceuticals and/or known therapeutic methods, such as, for example, those which are currently employed for treating these disorders. For example, in certain embodiments, an iRNA targeting C5 is administered in combination with, e.g., an agent useful in treating a complement component C5-associated disease as described elsewhere herein.

[0621] For example, additional therapeutics and therapeutic methods suitable for treating a subject that would benefit from reducton in C5 expression, e.g., a subject having a complement component C5-associated disease, include plasmapheresis, thrombolytic therapy (e.g., streptokinase), antiplatelet agents, folic acid, corticosteroids; immunosuppressive agents; estrogens, methotrexate, 6-MP, azathioprine sulphasalazine, mesalazine, olsalazine, chloroquinine/hydroxychloroquine, pencillamine, aurothiomalate (intramuscular and oral), azathioprine, cochicine, corticosteroids (oral, inhaled and local injection), beta-2 adrenoreceptor agonists (salbutamol, terbutaline, salmeteral), xanthines (theophylline, aminophylline), cromoglycate, nedocromil, ketotifen, ipratropium and oxitropium, cyclosporin, FK506, rapamycin, mycophenolate mofetil, leflunomide, NSAIDs, for example, ibuprofen, corticosteroids such as prednisolone, phosphodiesterase inhibitors, adensosine agonists, antithrombotic agents, complement inhibitors, adrenergic agents, agents which interfere with signalling by proinflammatory cytokines, such as TNF-α or IL-1 (e.g., IRAK, NIK, IKK, p38 or MAP kinase inhibitors), IL-1β converting enzyme inhibitors, TNFα converting enzyme (TACE) inhibitors, T-cell signalling inhibitors, such as kinase inhibitors, metalloproteinase inhibitors, sulfasalazine, azathioprine, 6-mercaptopurines, angiotensin converting enzyme inhibitors, soluble cytokine receptors and derivatives thereof (e.g., soluble p55 or p75 TNF receptors and the derivatives p75TNFRIgG (Enbrel™ and p55TNFRIgG (Lenercept)), sIL-IRI, sIL-IRII, and sIL-6R), antiinflammatory cytokines (e.g., IL-4, IL-10, IL-11, IL-13 and TGFβ), celecoxib, folic acid, hydroxychloroquine sulfate, rofecoxib, etanercept, infliximonoclonal antibody, naproxen, valdecoxib, sulfasalazine, methylprednisolone, meloxicam, methylprednisolone acetate, gold sodium thiomalate, aspirin, triamcinolone acetonide, propoxyphene napsylate/apap, folate, nabumetone, diclofenac, piroxicam, etodolac, diclofenac sodium, oxaprozin, oxycodone hcl, hydrocodone bitartrate/apap, diclofenac sodium/misoprostol, fentanyl, anakinra, human recombinant, tramadol hcl, salsalate, sulindac, cyanocobalamin/fa/pyridoxine, acetaminophen, alendronate sodium, prednisolone, morphine sulfate, lidocaine hydrochloride, indomethacin, glucosamine sulf/chondroitin, amitriptyline hcl, sulfadiazine, oxycodone hcl/acetaminophen, olopatadine hcl, misoprostol, naproxen sodium, omeprazole, cyclophosphamide, rituximonoclonal antibody, IL-1 TRAP, MRA, CTLA4-IG, IL-18 BP, anti-IL-18, Anti-IL15, BIRB-796, SCIO-469, VX-702, AMG-548, VX-740, Roflumilast, IC-485, CDC-801, Mesopram, cyclosporine, cytokine suppressive anti-inflammatory drug(s) (CSAIDs); CDP-571/BAY-10-3356 (humanized anti-TNFα antibody; Celltech/Bayer); cA2/infliximonoclonal antibody (chimeric anti-TNFα antibody; Centocor); 75 kdTNFR-IgG/etanercept (75 kD TNF receptor-IgG fusion protein; Immunex; see e.g., (1994) Arthr. Rheum. 37: S295; (1996) J. Invest. Med. 44:235A); 55 kdTNF-IgG (55 kD TNF receptor-IgG fusion protein; Hoffmann-LaRoche); IDEC-CE9.1/SB 210396 (non-depleting primatized anti-CD4 antibody; IDEC/SmithKline; see e.g., (1995) Arthr. Rheum. 38: S185); DAB 486-IL-2 and/or DAB 389-IL-2 (IL-2 fusion proteins; Seragen; see e.g., (1993) Arthrit. Rheum. 36:1223); Anti-Tac (humanized anti-IL-2Rα; Protein Design Labs/Roche); IL-4 (anti-inflammatory cytokine; DNAX/Schering); IL-10 (SCH 52000; recombinant IL-10, anti-inflammatory cytokine; DNAX/Schering); IL-4; IL-10 and/or IL-4 agonists (e.g., agonist antibodies); IL-IRA (IL-1 receptor antagonist; Synergen/Amgen); anakinra (KineretR/Amgen); TNF-bp/s-TNF (soluble TNF binding protein; see e.g., (1996) Arthr. Rheum. 39(9 (supplement)): S284; (1995) Amer. J. Physiol.-Heart and Circ. Physiol. 268: 37-42); R973401 (phosphodiesterase Type IV inhibitor; see e.g., (1996) Arthr. Rheum. 39(9 (supplement): S282); MK-966 (COX-2 Inhibitor; see e.g., (1996) Arthr. Rheum. 39(9 (supplement): S81); Iloprost (see e.g., (1996) Arthr. Rheum. 39(9 (supplement): S82); methotrexate; thalidomide (see e.g., (1996) Arthr. Rheum. 39(9 (supplement): S282) and thalidomide-related drugs (e.g., Celgen); leflunomide (anti-inflammatory and cytokine inhibitor; see e.g., (1996) Arthr. Rheum. 39(9 (supplement): S131; (1996) Inflamm. Res. 45: 103-107); tranexamic acid (inhibitor of plasminogen activation; see e.g., (1996) Arthr. Rheum. 39(9 (supplement): S284); T-614 (cytokine inhibitor; see e.g., (1996) Arthr. Rheum. 39(9 (supplement): S282); prostaglandin El (see e.g., (1996) Arthr. Rheum. 39(9 (supplement): S282); Tenidap (non-steroidal anti-inflammatory drug; see e.g., (1996) Arthr. Rheum. 39(9 (supplement): S280); Naproxen (non-steroidal anti-inflammatory drug; see e.g., (1996) Neuro. Report 7: 1209-1213); Meloxicam (non-steroidal anti-inflammatory drug); Ibuprofen (non-steroidal anti-inflammatory drug); Piroxicam (non-steroidal anti-inflammatory drug); Diclofenac (non-steroidal anti-inflammatory drug); Indomethacin (non-steroidal anti-inflammatory drug); Sulfasalazine (see e.g., (1996) Arthr. Rheum. 39(9 (supplement): S281); Azathioprine (see e.g., (1996) Arthr. Rheum. 39(9 (supplement): S281); ICE inhibitor (inhibitor of the enzyme interleukin-1β converting enzyme); zap-70 and/or lck inhibitor (inhibitor of the tyrosine kinase zap-70 or lck); VEGF inhibitor and/or VEGF-R inhibitor (inhibitors of vascular endothelial cell growth factor or vascular endothelial cell growth factor receptor; inhibitors of angiogenesis); corticosteroid anti-inflammatory drugs (e.g., SB203580); TNF-convertase inhibitors; anti-IL-12 antibodies; anti-IL-18 antibodies; interleukin-11 (see e.g., (1996) Arthr. Rheum. 39(9 (supplement): S296); interleukin-13 (see e.g., (1996) Arthr. Rheum. 39(9 (supplement): S308); interleukin-17 inhibitors (see e.g., (1996) Arthr. Rheum. 39(9 (supplement): S120); gold; penicillamine; chloroquine; chlorambucil; hydroxychloroquine; cyclosporine; cyclophosphamide; total lymphoid irradiation; anti-thymocyte globulin; anti-CD4 antibodies; CD5-toxins; orally-administered peptides and collagen; lobenzarit disodium; Cytokine Regulating Agents (CRAs) HP228 and HP466 (Houghten Pharmaceuticals, Inc.); ICAM-1 antisense phosphorothioate oligo-deoxynucleotides (ISIS 2302; Isis Pharmaceuticals, Inc.); soluble complement receptor 1 (TP10; T Cell Sciences, Inc.); prednisone; orgotein; glycosaminoglycan polysulphate; minocycline; anti-IL2R antibodies; marine and botanical lipids (fish and plant seed fatty acids; see e.g., DeLuca et al. (1995) Rheum. Dis. Clin. North Am. 21: 759-777); auranofin; phenylbutazone; meclofenamic acid; flufenamic acid; intravenous immune globulin; zileuton; azaribine; mycophenolic acid (RS-61443); tacrolimus (FK-506); sirolimus (rapamycin); amiprilose (therafectin); cladribine (2-chlorodeoxyadenosine); methotrexate; bcl-2 inhibitors (see Bruncko, M. et al. (2007) J. Med. Chem. 50(4): 641-662); antivirals and immune-modulating agents, small molecule inhibitor of KDR, small molecule inhibitor of Tie-2; methotrexate; prednisone; celecoxib; folic acid; hydroxychloroquine sulfate; rofecoxib; etanercept; infliximonoclonal antibody; leflunomide; naproxen; valdecoxib; sulfasalazine; methylprednisolone; ibuprofen; meloxicam; methylprednisolone acetate; gold sodium thiomalate; aspirin; azathioprine; triamcinolone acetonide; propxyphene napsylate/apap; folate; nabumetone; diclofenac; piroxicam; etodolac; diclofenac sodium; oxaprozin; oxycodone hcl; hydrocodone bitartrate/apap; diclofenac sodium/misoprostol; fentanyl; anakinra, human recombinant; tramadol hcl; salsalate; sulindac; cyanocobalamin/fa/pyridoxine; acetaminophen; alendronate sodium; prednisolone; morphine sulfate; lidocaine hydrochloride; indomethacin; glucosamine sulfate/chondroitin; cyclosporine; amitriptyline hcl; sulfadiazine; oxycodone hcl/acetaminophen; olopatadine hcl; misoprostol; naproxen sodium; omeprazole; mycophenolate mofetil; cyclophosphamide; rituximonoclonal antibody; IL-1 TRAP; MRA; CTLA4-IG; IL-18 BP; IL-12/23; anti-IL 18; anti-IL 15; BIRB-796; SCIO-469; VX-702; AMG-548; VX-740; Roflumilast; IC-485; CDC-801; mesopram, albuterol, salmeterol/fluticasone, montelukast sodium, fluticasone propionate, budesonide, prednisone, salmeterol xinafoate, levalbuterol hcl, albuterol sulfate/ipratropium, prednisolone sodium phosphate, triamcinolone acetonide, beclomethasone dipropionate, ipratropium bromide, azithromycin, pirbuterol acetate, prednisolone, theophylline anhydrous, methylprednisolone sodium succinate, clarithromycin, zafirlukast, formoterol fumarate, influenza virus vaccine, methylprednisolone, amoxicillin trihydrate, flunisolide, allergy injection, cromolyn sodium, fexofenadine hydrochloride, flunisolide/menthol, amoxicillin/clavulanate, levofloxacin, inhaler assist device, guaifenesin, dexamethasone sodium phosphate, moxifloxacin hcl, doxycycline hyclate, guaifenesin/d-methorphan, p-ephedrine/cod/chlorphenir, gatifloxacin, cetirizine hydrochloride, mometasone furoate, salmeterol xinafoate, benzonatate, cephalexin, pe/hydrocodone/chlorphenir, cetirizine hcl/pseudoephed, phenylephrine/cod/promethazine, codeine/promethazine, cefprozil, dexamethasone, guaifenesin/pseudoephedrine, chlorpheniramine/hydrocodone, nedocromil sodium, terbutaline sulfate, epinephrine, methylprednisolone, metaproterenol sulfate, aspirin, nitroglycerin, metoprolol tartrate, enoxaparin sodium, heparin sodium, clopidogrel bisulfate, carvedilol, atenolol, morphine sulfate, metoprolol succinate, warfarin sodium, lisinopril, isosorbide mononitrate, digoxin, furosemide, simvastatin, ramipril, tenecteplase, enalapril maleate, torsemide, retavase, losartan potassium, quinapril hcl/mag carb, bumetanide, alteplase, enalaprilat, amiodarone hydrochloride, tirofiban hcl m-hydrate, diltiazem hydrochloride, captopril, irbesartan, valsartan, propranolol hydrochloride, fosinopril sodium, lidocaine hydrochloride, eptifibatide, cefazolin sodium, atropine sulfate, aminocaproic acid, spironolactone, interferon, sotalol hydrochloride, potassium chloride, docusate sodium, dobutamine hcl, alprazolam, pravastatin sodium, atorvastatin calcium, midazolam hydrochloride, meperidine hydrochloride, isosorbide dinitrate, epinephrine, dopamine hydrochloride, bivalirudin, rosuvastatin, ezetimibe/simvastatin, avasimibe, and cariporide.

[0622] The iRNA agent (and/or an anti-complement component C5 antibody) and an additional therapeutic agent and/or treatment may be administered at the same time and/or in the same combination, e.g., parenterally, or the additional therapeutic agent can be administered as part of a separate composition or at separate times and/or by another method known in the art or described herein.

[0623] In one embodiment, a subject is administered an initial dose and one or more maintenance doses of an RNAi agent. The maintenance dose or doses can be the same or lower than the initial dose, e.g., one-half of the initial dose. A maintenance regimen can include treating the subject with a dose or doses ranging from about 10 mg to about 900 mg, e.g., about 10 mg, about 15 mg, about 20 mg, about 25 mg, about 50 mg, about 75 mg, about 100 mg, about 125 mg, about 150 mg, about 175 mg, 200 mg, about 225 mg, about 250 mg, about 275 mg, about 300 mg, about 325 mg, about 350 mg, about 375 mg, about 400 mg, about 425 mg, about 450 mg, about 475 mg, about 500 mg, about 525 mg, about 550 mg, about 575 mg, about 600 mg, about 625 mg, about 650 mg, about 675 mg, about 700 mg, about 725 mg, about 750 mg, about 775 mg, about 800 mg, about 825 mg, about 850 mg, about 875 mg, or about 900 mg per week. The maintenance doses are, for example, administered no more than once every 7 days, once every 10 days, once every 14 days, once every 21 days, or once every 30 days. Further, the treatment regimen may last for a period of time which will vary depending upon the nature of the particular disease, its severity and the overall condition of the patient.

[0624] The present invention also provides methods of using an iRNA agent of the invention and/or a composition containing an iRNA agent of the invention to reduce and/or inhibit complement component C5 expression in a cell. In other aspects, the present invention provides an iRNA of the invention and/or a composition comprising an iRNA of the invention for use in reducing and/or inhibiting C5 expression in a cell. In yet other aspects, use of an iRNA of the invention and/or a composition comprising an iRNA of the invention for the manufacture of a medicament for reducing and/or inhibiting C5 expression in a cell are provided.

[0625] The methods and uses include contacting the cell with an iRNA, e.g., a dsRNA, of the invention and maintaining the cell for a time sufficient to obtain degradation of the mRNA transcript of a C5 gene, thereby inhibiting expression of the C5 gene in the cell.

[0626] Reduction in gene expression can be assessed by any methods known in the art. For example, a reduction in the expression of C5 may be determined by determining the mRNA expression level of C5 using methods routine to one of ordinary skill in the art, e.g., Northern blotting, qRT-PCR, by determining the protein level of C5 using methods routine to one of ordinary skill in the art, such as Western blotting, immunological techniques, flow cytometry methods, ELISA, and/or by determining a biological activity of C5, such as CH₅₀ or AH₅₀ hemolysis assay, and/or by determining the biological activity of one or more molecules associated with the complement system, e.g., C5 products, such as C5a and C5b (or, in an in vivo setting, e.g., hemolysis).

[0627] In the methods and uses of the invention the cell may be contacted in vitro or in vivo, i.e., the cell may be within a subject. In embodiments of the invention in which the cell is within a subject, the methods may include further contacting the cell with an anti-complement component C5 antibody, e.g., eculizumab.

[0628] A cell suitable for treatment using the methods of the invention may be any cell that expresses a C5 gene. A cell suitable for use in the methods and uses of the invention may be a mammalian cell, e.g., a primate cell (such as a human cell or a non-human primate cell, e.g., a monkey cell or a chimpanzee cell), a non-primate cell (such as a cow cell, a pig cell, a camel cell, a llama cell, a horse cell, a goat cell, a rabbit cell, a sheep cell, a hamster, a guinea pig cell, a cat cell, a dog cell, a rat cell, a mouse cell, a lion cell, a tiger cell, a bear cell, or a buffalo cell), a bird cell (e.g., a duck cell or a goose cell), or a whale cell. In one embodiment, the cell is a human cell, e.g., a human liver cell.

[0629] C5 expression may be inhibited in the cell by at least about 5%, 6%, 7%, 8%, 9%, 10%, 11%, 12%, 13%, 14%, 15%, 16%, 17%, 18%, 19%, 20%, 21%, 22%, 23%, 24%, 25%, 26%, 27%, 28%, 29%, 30%, 31%, 32%, 33%, 34%, 35%, 36%, 37%, 38%, 39%, 40%, 41%, 42%, 43%, 44%, 45%, 46%, 47%, 48%, 49%, 50%, 51%, 52%, 53%, 54%, 55%, 56%, 57%, 58%, 59%, 60%, 61%, 62%, 63%, 64%, 65%, 66%, 67%, 68%, 69%, 70%, 71%, 72%, 73%, 74%, 75%, 76%, 77%, 78%, 79%, 80%, 81%, 82%, 83%, 84%, 85%, 86%, 87%, 88%, 89%, 90%, 91%, 92%, 93%, 94%, 95%, 96%, 97%, 98%, 99%, or about 100%.

[0630] The in vivo methods and uses of the invention may include administering to a subject a composition containing an iRNA, where the iRNA includes a nucleotide sequence that is complementary to at least a part of an RNA transcript of the C5 gene of the mammal to be treated. When the organism to be treated is a mammal such as a human, the composition can be administered by any means known in the art including, but not limited to subcutaneous, intravenous, oral, intraperitoneal, or parenteral routes, including intracranial (e.g., intraventricular, intraparenchymal and intrathecal), intramuscular, transdermal, airway (aerosol), nasal, rectal, and topical (including buccal and sublingual) administration. In certain embodiments, the compositions are administered by subcutaneous or intravenous infusion or injection.

[0631] In some embodiments, the administration is via a depot injection. A depot injection may release the iRNA in a consistent way over a prolonged time period. Thus, a depot injection may reduce the frequency of dosing needed to obtain a desired effect, e.g., a desired inhibition of C5, or a therapeutic or prophylactic effect. A depot injection may also provide more consistent serum concentrations. Depot injections may include subcutaneous injections or intramuscular injections. In preferred embodiments, the depot injection is a subcutaneous injection.

[0632] In some embodiments, the administration is via a pump. The pump may be an external pump or a surgically implanted pump. In certain embodiments, the pump is a subcutaneously implanted osmotic pump. In other embodiments, the pump is an infusion pump. An infusion pump may be used for intravenous, subcutaneous, arterial, or epidural infusions. In preferred embodiments, the infusion pump is a subcutaneous infusion pump. In other embodiments, the pump is a surgically implanted pump that delivers the iRNA to the liver.

[0633] The mode of administration may be chosen based upon whether local or systemic treatment is desired and based upon the area to be treated. The route and site of administration may be chosen to enhance targeting.

[0634] In one aspect, the present invention also provides methods for inhibiting the expression of a C5 gene in a mammal, e.g., a human. The present invention also provides a composition comprising an iRNA, e.g., a dsRNA, that targets a C5 gene in a cell of a mammal for use in inhibiting expression of the C5 gene in the mammal. In another aspect, the present invention provides use of an iRNA, e.g., a dsRNA, that targets a C5 gene in a cell of a mammal in the manufacture of a medicament for inhibiting expression of the C5 gene in the mammal.

[0635] The methods and uses include administering to the mammal, e.g., a human, a composition comprising an iRNA, e.g., a dsRNA, that targets a C5 gene in a cell of the mammal and maintaining the mammal for a time sufficient to obtain degradation of the mRNA transcript of the C5 gene, thereby inhibiting expression of the C5 gene in the mammal. In some embodiment, the methods further comprise administering an anti-complement component C5 antibody, e.g., eculizumab, to the subject.

[0636] Reduction in gene expression can be assessed by any methods known it the art and by methods, e.g. qRT-PCR, described herein. Reduction in protein production can be assessed by any methods known it the art and by methods, e.g., ELISA or Western blotting, described herein. In one embodiment, a puncture liver biopsy sample serves as the tissue material for monitoring the reduction in C5 gene and/or protein expression. In another embodiment, a blood sample serves as the tissue material for monitoring the reduction in C5 gene and/or protein expression. In other embodiments, inhibition of the expression of a C5 gene is monitored indirectly by, for example, determining the expression and/or activity of a gene in a C5 pathway, including, for example, C5a, C5b, and soluble C5b-9 (see, e.g., FIG. 1). For example, the activity of CD59 may be monitored to determine the inhibition of expression of a C5 gene. CH₅₀, AH₅₀, clot formation and/or serum lactate dehydrogenase (LDH), in a sample, e.g., a blood or liver sample, may also be measured. Suitable assays are further described in the Examples section below.

[0637] Unless otherwise defined, all technical and scientific terms used herein have the same meaning as commonly understood by one of ordinary skill in the art to which this invention belongs. Although methods and materials similar or equivalent to those described herein can be used in the practice or testing of the iRNAs and methods featured in the invention, suitable methods and materials are described below. All publications, patent applications, patents, and other references mentioned herein are incorporated by reference in their entirety. In case of conflict, the present specification, including definitions, will control. In addition, the materials, methods, and examples are illustrative only and not intended to be limiting.

### Examples

### Example 1. iRNA Synthesis

### Source of Reagents

[0638] Where the source of a reagent is not specifically given herein, such reagent can be obtained from any supplier of reagents for molecular biology at a quality/purity standard for application in molecular biology.

Transcripts siRNA design was carried out to identify siRNAs targeting human, rhesus (Macaca mulatta), mouse, and rat C5 transcripts annotated in the NCBI Gene database (http://www.ncbi.nlm.nih.gov/gene/). Design used the following transcripts from the NCBI RefSeq collection: Human-NM_001735.2; Rhesus-XM_001095750.2; Mouse-NM_010406.2; Rat-XM_345342.4. SiRNA duplexes were designed in several separate batches, including but not limited to batches containing duplexes matching human and rhesus transcripts only; human, rhesus, and mouse transcripts only; human, rhesus, mouse, and rat transcripts only; and mouse and rat transcripts only. All siRNA duplexes were designed that shared 100% identity with the listed human transcript and other species transcripts considered in each design batch (above).
siRNA Design, Specificity, and Efficacy Prediction

[0639] The predicted specificity of all possible 19mers was predicted from each sequence. Candidate 19mers were then selected that lacked repeats longer than 7 nucleotides. These 2971 candidate human/rhesus, 142 human/rhesus/mouse, 54 human/rhesus/mouse/rat, and 807 mouse/rat siRNAs were used in comprehensive searches against the appropriate transcriptomes (defined as the set of NM_ and XM_ records within the human, rhesus, dog, mouse, or rat NCBI Refseq sets) using an exhaustive “brute-force” algorithm implemented in the python script ‘BruteForce.py’. The script next parsed the transcript-oligo alignments to generate a score based on the position and number of mismatches between the siRNA and any potential ‘off-target’ transcript. The off-target score is weighted to emphasize differences in the ‘seed’ region of siRNAs, in positions 2-9 from the 5′-end of the molecule.

[0640] Each oligo-transcript pair from the brute-force search was given a mismatch score by summing the individual mismatch scores; mismatches in the position 2-9 were counted as 2.8, mismatches in the cleavage site positions 10-11 were counted as 1.2, and mismatches in region 12-19 counted as 1.0. An additional off-target prediction was carried out by comparing the frequency of heptamers and octomers derived from 3 distinct, seed-derived hexamers of each oligo. The hexamers from positions 2-7 relative to the 5′ start were used to create 2 heptamers and one octamer. ‘Heptamer1’ was created by adding a 3′-A to the hexamer; heptamer2 was created by adding a 5′-A to the hexamer; the octomer was created by adding an A to both 5′- and 3′-ends of the hexamer. The frequency of octamers and heptamers in the human, rhesus, mouse, or rat 3′-UTRome (defined as the subsequence of the transcriptome from NCBI's Refseq database where the end of the coding region, the ‘CDS’, is clearly defined) was pre-calculated. The octamer frequency was normalized to the heptamer frequency using the median value from the range of octamer frequencies. A ‘mirSeedScore’ was then calculated by calculating the sum of ((3× normalized octamer count)+(2× heptamer2 count)+(1×heptamer1 count)).

[0641] Both siRNAs strands were assigned to a category of specificity according to the calculated scores: a score above 3 qualifies as highly specific, equal to 3 as specific and between 2.2 and 2.8 as moderately specific. The duplexes were sorted by the specificity of the antisense strand and those duplexes whose antisense oligos lacked GC at the first position, lacked G at both positions 13 and 14, and had 3 or more Us or As in the seed region were selected.

[0642] For GalNaC-conjugated duplexes, sense 21mer and antisense 23mer oligos were designed by extending antisense 19mers (described above) to 23 nucleotides of target-complementary sequence. All species transcripts included in the design batch were checked for complementarity. Only 23mers that preserved 100% sequence complementarity in at least 2 species were used. For each duplex, the sense 21mer was specified as the reverse complement of the first 21 nucleotides of the antisense strand.

siRNA Sequence Selection

[0643] A total of 23 sense and 23 antisense derived human/rhesus, 6 sense and 6 antisense human/rhesus/mouse, 6 sense and 6 antisense derived human/rhesus/mouse/mouse/rat, and 13 sense and 13 antisense derived mouse/rat siRNA 19mer oligos were synthesized and formed into duplexes.

[0644] The above 19mer sets were extended to 21/23mer duplexes for GalNac conjugate design and re-classified according to their new species matches. Twenty-seven sense and 27 antisense derived human/rhesus, 1 sense and 1 sense derived human/rhesus/mouse, 3 sense and 3 antisense derived human/rhesus/rat, 4 sense and 4 antisense derived human/rhesus/mouse/rat, and 13 sense and 13 antisense derived mouse/rat 21mer (sense) and 23mer (antisense) oligos were synthesized and formed into duplexes.

[0645] A detailed list of C5 sense and antisense strand sequences is shown in Tables 3-6.

siRNA Synthesis

### General Small and Medium Scale RNA Synthesis Procedure

[0646] RNA oligonucleotides were synthesized at scales between 0.2-500 μmol using commercially available 5′-O-(4,4′-dimethoxytrityl)-2′-O-t-butyldimethylsilyl-3′-O-(2-cyanoethyl-N,N-diisopropyl)phosphoramidite monomers of uridine, 4-N-acetylcytidine, 6-N-benzoyladenosine and 2-N-isobutyrylguanosine and the corresponding 2′-O-methyl and 2′-fluoro phosphoramidites according to standard solid phase oligonucleotide synthesis protocols. The amidite solutions were prepared at 0.1-0.15 M concentration and 5-ethylthio-1H-tetrazole (0.25-0.6 M in acetonitrile) was used as the activator. Phosphorothioate backbone modifications were introduced during synthesis using 0.2 M phenylacetyl disulfide (PADS) in lutidine:acetonitrile (1:1) (v;v) or 0.1 M 3-(dimethylaminomethylene) amino-3H-1,2,4-dithiazole-5-thione (DDTT) in pyridine for the oxidation step. After completion of synthesis, the sequences were cleaved from the solid support and deprotected using methylamine followed by triethylamine.3HF to remove any 2′-O-t-butyldimethylsilyl protecting groups present.

[0647] For synthesis scales between 5-500 μmol and fully 2′ modified sequences (2′-fluoro and/or 2′-O-methyl or combinations thereof) the oligonucleotides where deprotected using 3:1 (v/v) ethanol and concentrated (28-32%) aqueous ammonia either at 35° C. 16 h or 55° C. for 5.5 h. Prior to ammonia deprotection the oligonucleotides where treated with 0.5 M piperidine in acetonitrile for 20 min on the solid support. The crude oligonucleotides were analyzed by LC-MS and anion-exchange HPLC (IEX-HPLC). Purification of the oligonucleotides was carried out by IEX HPLC using: 20 mM phosphate, 10%-15% ACN, pH=8.5 (buffer A) and 20 mM phosphate, 10%-15% ACN, 1 M NaBr, pH=8.5 (buffer B). Fractions were analyzed for purity by analytical HPLC. The product-containing fractions with suitable purity were pooled and concentrated on a rotary evaporator prior to desalting. The samples were desalted by size exclusion chromatography and lyophilized to dryness. Equal molar amounts of sense and antisense strands were annealed in 1×PBS buffer to prepare the corresponding siRNA duplexes.

[0648] For small scales (0.2-1 μmol), synthesis was performed on a MerMade 192 synthesizer in a 96 well format. In case of fully 2′-modified sequences (2′-fluoro and/or 2′-O-methyl or combinations thereof) the oligonucleotides where deprotected using methylamine at room temperature for 30-60 min followed by incubation at 60° C. for 30 min or using 3:1 (v/v) ethanol and concentrated (28-32%) aqueous ammonia at room temperature for 30-60 min followed by incubation at 40° C. for 1.5 hours. The crude oligonucleotides were then precipitated in a solution of acetonitrile:acetone (9:1) and isolated by centrifugation and decanting the supernatant. The crude oligonucleotide pellet was re-suspended in 20 mM NaOAc buffer and analyzed by LC-MS and anion exchange HPLC. The crude oligonucleotide sequences were desalted in 96 deep well plates on a 5 mL HiTrap Sephadex G25 column (GE Healthcare). In each well about 1.5 mL samples corresponding to an individual sequence was collected. These purified desalted oligonucleotides were analyzed by LC-MS and anion exchange chromatography. Duplexes were prepared by annealing equimolar amounts of sense and antisense sequences on a Tecan robot. Concentration of duplexes was adjusted to 10 μM in 1×PBS buffer.

### Synthesis of GalNAc-Conjugated Oligonucleotides for In Vivo Analysis

[0649] Oligonucleotides conjugated with GalNAc ligand at their 3′-terminus were synthesized at scales between 0.2-500 μmol using a solid support pre-loaded with a Y-shaped linker bearing a 4,4′-dimethoxytrityl (DMT)-protected primary hydroxy group for oligonucleotide synthesis and a GalNAc ligand attached through a tether.

[0650] For synthesis of GalNAc conjugates in the scales between 5-500 μmol, the above synthesis protocol for RNA was followed with the following adaptions: For polystyrene-based synthesis supports 5% dichloroacetic acid in toluene was used for DMT-cleavage during synthesis. Cleavage from the support and deprotection was performed as described above. Phosphorothioate-rich sequences (usually >5 phorphorothioates) were synthesized without removing the final 5′-DMT group (“DMT-on”) and, after cleavage and deprotection as described above, purified by reverse phase HPLC using 50 mM ammonium acetate in water (buffer A) and 50 mM ammoniumacetate in 80% acetonitirile (buffer B). Fractions were analyzed for purity by analytical HPLC and/or LC-MS. The product-containing fractions with suitable purity were pooled and concentrated on a rotary evaporator. The DMT-group was removed using 20%-25% acetic acid in water until completion. The samples were desalted by size exclusion chromatography and lyophilized to dryness. Equal molar amounts of sense and antisense strands were annealed in 1×PBS buffer to prepare the corresponding siRNA duplexes.

[0651] For small scale synthesis of GalNAc conjugates (0.2-1 μmol), including sequences with multiple phosphorothioate linkages, the protocols described above for synthesis of RNA or fully 2′-F/2′-OMe-containing sequences on MerMade platform were applied. Synthesis was performed on pre-packed columns containing GalNAc-functionalized controlled pore glass support.

### Example 2. In Vitro Screening

### Cell Culture and Transfections

[0652] Hep3B cells (ATCC, Manassas, VA) were grown to near confluence at 37° C. in an atmosphere of 5% CO2 in Eagle's Minimum Essential Medium (ATCC) supplemented with 10% FBS, streptomycin, and glutamine (ATCC) before being released from the plate by trypsinization. Cells were washed and re-suspended at 0.25×10⁶ cells/ml. During transfections, cells were plated onto a 96-well plate with about 20,000 cells per well.

[0653] Primary mouse hepatocytes (PMH) were freshly isolated from a C57BL/6 female mouse (Charles River Labortories International, Inc. Willmington, MA) less than 1 hour prior to transfections and grown in primary hepatocyte media. Cells were resuspended at 0.11×10⁶ cells/ml in In VitroGRO CP Rat (plating) medium (Celsis In Vitro Technologies, catalog number S01494). During transfections, cells were plated onto a BD BioCoat 96 well collagen plate (BD, 356407) at 10,000 cells per well and incubated at 37° C. in an atmosphere of 5% CO2.

[0654] Cryopreserved Primary Cynomolgus Hepatocytes (Celsis In Vitro Technologies, M003055-P) were thawed at 37° C. water bath immediately prior to usage and re-suspended at 0.26×10⁶ cells/ml in In VitroGRO CP (plating) medium (Celsis In Vitro Technologies, catalog number Z99029). During transfections, cells were plated onto a BD BioCoat 96 well collagen plate (BD, 356407) at 25,000 cells per well and incubated at 37° C. in an atmosphere of 5% CO₂.

[0655] For Hep3B, PMH, and primary Cynomolgus hepatocytes, transfection was carried out by adding 14.8 μl of Opti-MEM plus 0.2 μl of Lipofectamine RNAiMax per well (Invitrogen, Carlsbad CA. catalog number13778-150) to 5 μl of each siRNA duplex to an individual well in a 96-well plate. The mixture was then incubated at room temperature for 20 minutes. Eighty μl of complete growth media without antibiotic containing the appropriate cell number were then added to the siRNA mixture. Cells were incubated for 24 hours prior to RNA purification.

[0656] Single dose experiments were performed at 10 nM and 0.1 nM final duplex concentration for GalNAc modified sequences or at 1 nM and 0.01 nM final duplex concentration for all other sequences. Dose response experiments were done at 3, 1, 0.3, 0.1, 0.037, 0.0123, 0.00412, and 0.00137 nM final duplex concentration for primary mouse hepatocytes and at 3, 1, 0.3, 0.1, 0.037, 0.0123, 0.00412, 0.00137, 0.00046, 0.00015, 0.00005, and 0.000017 nM final duplex concentration for Hep3B cells.

### Free Uptake Transfection

[0657] Free uptake experiments were performed by adding 10 μl of siRNA duplexes in PBS per well into a 96 well plate. Ninety μl of complete growth media containing appropriate cell number for the cell type was then added to the siRNA. Cells were incubated for 24 hours prior to RNA purification. Single dose experiments were performed at 500 nM and 5 nM final duplex concentration and dose response experiments were done at 1000, 333, 111, 37, 12.3, 4.12, 1.37, 0.46 nM final duplex concentration.

Total RNA Isolation Using DYNABEADS mRNA Isolation Kit (Invitrogen, Part #: 610-12)

[0658] Cells were harvested and lysed in 150 μl of Lysis/Binding Buffer then mixed for 5 minutes at 850 rpm using an Eppendorf Thermomixer (the mixing speed was the same throughout the process). Ten microliters of magnetic beads and 80 μl Lysis/Binding Buffer mixture were added to a round bottom plate and mixed for 1 minute. Magnetic beads were captured using a magnetic stand and the supernatant was removed without disturbing the beads. After removing the supernatant, the lysed cells were added to the remaining beads and mixed for 5 minutes. After removing the supernatant, magnetic beads were washed 2 times with 150 μl Wash Buffer A and mixed for 1 minute. The beads were captured again and the supernatant was removed. The beads were then washed with 150 μl Wash Buffer B, captured and the supernatant was removed. The beads were next washed with 150 μl Elution Buffer, captured and the supernatant removed. Finally, the beads were allowed to dry for 2 minutes. After drying, 50 μl of Elution Buffer was added and mixed for 5 minutes at 70° C. The beads were captured on magnet for 5 minutes. Forty-five μl of supernatant was removed and added to another 96 well plate.

cDNA Synthesis Using ABI High Capacity cDNA Reverse Transcription Kit (Applied Biosystems, Foster City, CA, Cat #4368813)

[0659] A master mix of 2 μl 10× Buffer, 0.8 μl 25× dNTPs, 2 μl Random primers, 1 μl Reverse Transcriptase, 1 μl RNase inhibitor and 3.2 μl of H₂O per reaction as prepared. Equal volumes master mix and RNA were mixed for a final volume of 12 μl for in vitro screened or 20 μl for in vivo screened samples. cDNA was generated using a Bio-Rad C-1000 or S-1000 thermal cycler (Hercules, CA) through the following steps: 25° C. for 10 minutes, 37° C. for 120 minutes, 85° C. for 5 seconds, and 4° C. hold.

### Real Time PCR

[0660] Two μl of cDNA were added to a master mix containing 2 μl of H2O, 0.5 μl GAPDH TaqMan Probe (Life Technologies catalog number 4326317E for Hep3B cells, catalog number 352339E for primary mouse hepatocytes or custom probe for cynomolgus primary hepatocytes), 0.5 μl C5 TaqMan probe (Life Technologies c catalog number Hs00156197_ml for Hep3B cells or mm00439275_ml for Primary Mouse Hepatoctyes or custom probe for cynomolgus primary hepatocytes) and 5 μl Lightcycler 480 probe master mix (Roche catalog number 04887301001) per well in a 384 well plates (Roche catalog number 04887301001). Real time PCR was performed in an Roche LC480 Real Time PCR system (Roche) using the ΔΔCt(RQ) assay. For in vitro screening, each duplex was tested with two biological replicates unless otherwise noted and each Real Time PCR was performed in duplicate technical replicates. For in vivo screening, each duplex was tested in one or more experiments (3 mice per group) and each Real Time PCR was run in duplicate technical replicates.

[0661] To calculate relative fold change in C5 mRNA levels, real time data were analyzed using the ΔΔCt method and normalized to assays performed with cells transfected with 10 nM AD-1955, or mock transfected cells. IC₅₀s were calculated using a 4 parameter fit model using XLFit and normalized to cells transfected with AD-1955 over the same dose range, or to its own lowest dose.

[0662] The sense and antisense sequences of AD-1955 are:
[0663] SENSE: cuuAcGcuGAGuAcuucGAdTsdT (SEQ ID NO: 13);
[0664] ANTISENSE: UCGAAGuACUcAGCGuAAGdTsdT (SEQ ID NO: 14).

[0665] Table 7 shows the results of a single dose screen in Hep3B cells transfected with the indicated GalNAC conjugated modified iRNAs. Data are expressed as percent of message remaining relative to untreated cells.

[0666] Table 8 shows the results of a single dose transfection screen in primary mouse hepatocytes transfected with the indicated GalNAC conjugated modified iRNAs. Data are expressed as percent of message remaining relative to untreated cells.

[0667] Table 9 shows the results of a single dose free uptake screen in primary Cynomolgus hepatocytes with the indicated GalNAC conjugated modified iRNAs. Data are expressed as percent of message remaining relative to untreated cells.

[0668] Table 10 shows the results of a single dose free uptake screen in primary mouse hepatocytes with the indicated GalNAC conjugated modified iRNAs. Data are expressed as percent of message remaining relative to untreated cells.

[0669] Table 11 shows the dose response of a free uptake screen in primary Cynomolgus hepatocytes with the indicated GalNAC conjugated modified iRNAs. The indicated IC₅₀ values represent the IC₅₀ values relative to untreated cells.

[0670] Table 12 shows the dose response of a free uptake screen in primary mouse hepatocytes with the indicated GalNAC conjugated modified iRNAs. The indicated IC₅₀ values represent the IC₅₀ values relative to untreated cells.

[0671] Table 13 shows the results of a single dose screen in Hep3B cells transfected with the indicated modified and unmodified iRNAs. Data are expressed as percent of message remaining relative to untreated cells. The 0.01 nM dose was a single biological transfection and the 1 nM dose was a duplicate biological transfection.

[0672] Table 14 shows the results of a single dose screen in primary mouse hepatocytes transfected with the indicated modified and unmodified iRNAs. Data are expressed as percent of message remaining relative to untreated cells.

[0673] Table 15 shows the dose response in Hep3B cells transfected with the indicated modified and unmodified iRNAs. The indicated IC₅₀ values represent the IC₅₀ values relative to untreated cells.

[0674] Table 16 shows the dose response in primary mouse hepatocytes transfected with the indicated modified and unmodified iRNAs. The indicated IC₅₀ values represent the IC₅₀ values relative to untreated cells.

TABLE 2
Abbreviations of nucleotide monomers used in nucleic
acid sequence representation. It will be understood
that these monomers, when present in an oligonucleotide,
are mutually linked by 5′-3′-phosphodiester bonds.

| Abbreviation | Nucleotide(s) |
|---|---|
| A | Adenosine-3′-phosphate |
| Af | 2′-fluoroadenosine-3′-phosphate |
| Afs | 2′-fluoroadenosine-3′-phosphorothioate |
| As | adenosine-3′-phosphorothioate |
| C | cytidine-3′-phosphate |
| Cf | 2′-fluorocytidine-3′-phosphate |
| Cfs | 2′-fluorocytidine-3′-phosphorothioate |
| Cs | cytidine-3′-phosphorothioate |
| G | guanosine-3′-phosphate |
| Gf | 2′-fluoroguanosine-3′-phosphate |
| Gfs | 2′-fluoroguanosine-3′-phosphorothioate |
| Gs | guanosine-3′-phosphorothioate |
| T | 5′-methyluridine-3′-phosphate |
| Tf | 2′-fluoro-5-methyluridine-3′-phosphate |
| Tfs | 2′-fluoro-5-methyluridine-3′-phosphorothioate |
| Ts | 5-methyluridine-3′-phosphorothioate |
| U | Uridine-3′-phosphate |
| Uf | 2′-fluorouridine-3′-phosphate |
| Ufs | 2′-fluorouridine-3′-phosphorothioate |
| Us | uridine-3′-phosphorothioate |
| N | any nucleotide (G, A, C, T or U) |
| a | 2′-O-methyladenosine-3′-phosphate |
| as | 2′-O-methyladenosine-3′-phosphorothioate |
| c | 2′-O-methylcytidine-3′-phosphate |
| cs | 2′-O-methylcytidine-3′-phosphorothioate |
| g | 2′-O-methylguanosine-3′-phosphate |
| gs | 2′-O-methylguanosine-3′-phosphorothioate |
| t | 2′-O-methyl-5-methyluridine-3′-phosphate |
| ts | 2′-O-methyl-5-methyluridine-3′-phosphorothioate |
| u | 2′-O-methyluridine-3′-phosphate |
| us | 2′-O-methyluridine-3′-phosphorothioate |
| s | phosphorothioate linkage |
| L96 | N-[tris(GalNAc-alkyl)-amidodecanoyl)]-4-hydroxyprolinol |
| | Hyp-(GalNAc-alkyl)3 |
| (dt) | deoxy-thymine |

TABLE 3
Unmodified Sense and Antisense Strand Sequences of C5 dsRNAs

| | | | SEQ | | | SEQ | |
|---|---|---|---|---|---|---|---|
| | Sense | Sense Unmodified | ID | | Antisense | ID | Species_ |
| Duplex ID | strand | Sequence | NO: | Antisense | Unmodified Sequence | NO: | Oligo name¹ |
| AD-58093.1² | A-118310.1 | AAUAACUCACUAUAAUUACUU | 15 | A-118311.1 | AAGUAAUUAUAGUGAGUUAUUUU | 66 | NM_001735.2_ |
| UM³ | | | | | | | 1517-1539_as |
| AD-58099.1 | A-118312.1 | UGACAAAAUAACUCACUAUAA | 16 | A-118313.1 | UUAUAGUGAGUUAUUUUGUCAAU | 67 | NM_001735.2_ |
| UM | | | | | | | 1511-1533_as |
| AD-58105.1 | A-118314.1 | CUUCCUCUGGAAAUUGGCCUU | 17 | A-118315.1 | AAGGCCAAUUUCCAGAGGAAGCA | 68 | NM_001735.2_ |
| UM | | | | | | | 2733-2755_as |
| AD-58111.1 | A-118316.1 | GACAAAAUAACUCACUAUAAU | 18 | A-118317.1 | AUUAUAGUGAGUUAUUUUGUCAA | 69 | NM_001735.2_ |
| UM | | | | | | | 1512-1534_as |
| AD-58117.1 | A-118318.1 | UCCUCUGGAAAUUGGCCUUCA | 19 | A-118319.1 | UGAAGGCCAAUUUCCAGAGGAAG | 70 | NM_001735.2_ |
| UM | | | | | | | 2735-2757_as |
| AD-58123.1 | A-118320.1 | AAGCAAGAUAUUUUUAUAAUA | 20 | A-118321.1 | UAUUAUAAAAAUAUCUUGCUUUU | 71 | NM_001735.2_ |
| UM | | | | | | | 784-806_as |
| AD-58129.1 | A-118322.1 | AAAAUGUUUUUGUCAAGUACA | 21 | A-118323.1 | UGUACUUGACAAAAACAUUUUCU | 72 | NM_001735.2_ |
| UM | | | | | | | 4744-4766_as |
| AD-58088.1 | A-118324.1 | AUUUAAACAACAAGUACCUUU | 22 | A-118325.1 | AAAGGUACUUGUUGUUUAAAUCU | 73 | NM_001735.2_ |
| UM | | | | | | | 982-1004_as |
| AD-58094.1 | A-118326.1 | AUUCAGAAAGUCUGUGAAGGA | 23 | A-118327.1 | UCCUUCACAGACUUUCUGAAUUU | 74 | NM_001735.2_ |
| UM | | | | | | | 4578-4600_as |
| AD-58100.1 | A-118328.1 | ACACUGAAGCAUUUGAUGCAA | 24 | A-118329.1 | UUGCAUCAAAUGCUUCAGUGUAU | 75 | NM_001735.2_ |
| UM | | | | | | | 169-191_as |
| AD-58106.1 | A-118330.1 | GCAGUUCUGUGUUAAAAUGUC | 25 | A-118331.1 | GACAUUUUAACACAGAACUGCAU | 76 | NM_001735.2_ |
| UM | | | | | | | 2591-2613_as |
| AD-58112.1 | A-118332.1 | AGGAUUUUGAGUGUAAAAGGA | 26 | A-118333.1 | UCCUUUUACACUCAAAAUCCUUU | 77 | NM_001735.2_ |
| UM | | | | | | | 2955-2977_as |
| AD-58118.1 | A-118334.1 | AAUGAUGAACCUUGUAAAGAA | 27 | A-118335.1 | UUCUUUACAAGGUUCAUCAUUUU | 78 | NM_001735.2_ |
| UM | | | | | | | 2025-2047_as |
| AD-58124.1 | A-118336.1 | AUCAUUGGAACAUUUUUCAUU | 28 | A-118337.1 | AAUGAAAAAUGUUCCAAUGAUUU | 79 | NM_001735.2_ |
| UM | | | | | | | 3118-3140_as |
| AD-58130.1 | A-118338.1 | AGCCAGAAAUUCGGAGUUAUU | 29 | A-118339.1 | AAUAACUCCGAAUUUCUGGCUUG | 80 | NM_001735.2_ |
| UM | | | | | | | 2317-2339_as |
| AD-58089.1 | A-118340.1 | UCCCUGGGAGAUAAAACUCAC | 30 | A-118341.1 | GUGAGUUUUAUCUCCCAGGGAAA | 81 | NM_001735.2_ |
| UM | | | | | | | 3618-3640_as |
| AD-58095.1 | A-118342.1 | GAAAAUGAUGAACCUUGUAAA | 31 | A-118343.1 | UUUACAAGGUUCAUCAUUUUCUU | 82 | NM_001735.2_ |
| UM | | | | | | | 2022-2044_as |
| AD-58101.1 | A-118344.1 | AUUGCUCAAGUCACAUUUGAU | 32 | A-118345.1 | AUCAAAUGUGACUUGAGCAAUUC | 83 | NM_001735.2_ |
| UM | | | | | | | 918-940 as |
| AD-58107.1 | A-118346.1 | GAGAUUGCAUAUGCUUAUAAA | 33 | A-118347.1 | UUUAUAAGCAUAUGCAAUCUCUG | 84 | NM_001735.2_ |
| UM | | | | | | | 4698-4720_as |
| AD-58113.1 | A-118348.1 | GUUAUCCUGAUAAAAAAUUUA | 34 | A-118349.1 | UAAAUUUUUUAUCAGGAUAACUU | 85 | NM_001735.2_ |
| UM | | | | | | | 205-227_as |
| AD-58119.1 | A-118350.1 | AGGAAGUUUGCAGCUUUUAUU | 35 | A-118351.1 | AAUAAAAGCUGCAAACUUCCUCA | 86 | NM_001735.2_ |
| UM | | | | | | | 4147-4169_as |
| AD-58125.1 | A-118352.1 | GAAGAAAUUGAUCAUAUUGGA | 36 | A-118353.1 | UCCAAUAUGAUCAAUUUCUUCUA | 87 | NM_001735.2_ |
| UM | | | | | | | 555-577_as |
| AD-58131.1 | A-118354.1 | AUCCUGAUAAAAAAUUUAGUU | 37 | A-118355.1 | AACUAAAUUUUUUAUCAGGAUAA | 88 | NM_001735.2_ |
| UM | | | | | | | 208-230_as |
| AD-58090.1 | A-118356.1 | UGGAAAAGAAAUCUUAGUAAA | 38 | A-118357.1 | UUUACUAAGAUUUCUUUUCCAAA | 89 | NM_001735.2_ |
| UM | | | | | | | 2786-2808_as |
| AD-58096.1 | A-118358.1 | UCUUAUCAAAGUAUAAACAUU | 39 | A-118359.1 | AAUGUUUAUACUUUGAUAAGAUG | 90 | NM_001735.2_ |
| UM | | | | | | | 1596-1618_as |
| AD-58102.1 | A-118360.1 | UCCCUACAAACUGAAUUUGGU | 40 | A-118361.1 | ACCAAAUUCAGUUUGUAGGGAGA | 91 | NM_001735.2_ |
| UM | | | | | | | 1082-1104_as |
| AD-58108.1 | A-118362.1 | CAGGAGCAAACAUAUGUCAUU | 41 | A-118363.1 | AAUGACAUAUGUUUGCUCCUGUC | 92 | NM_001735.2_ |
| UM | | | | | | | 87-109_as |
| AD-58114.1 | A-118364.1 | ACAUGUAACAACUGUAGUUCA | 42 | A-118365.1 | UGAACUACAGUUGUUACAUGUAC | 93 | NM_001735.2_ |
| UM | | | | | | | 4109-4131_as |
| AD-58120.1 | A-118366.1 | CAGGAAAUCAUUGGAACAUUU | 43 | A-118367.1 | AAAUGUUCCAAUGAUUUCCUGUU | 94 | NM_001735.2_ |
| UM | | | | | | | 3112-3134_as |
| AD-58126.1 | A-118368.1 | UUUAAGAAUUUUGAAAUUACU | 44 | A-118369.1 | AGUAAUUUCAAAAUUCUUAAAGU | 95 | NM_001735.2_ |
| UM | | | | | | | 759-781_as |
| AD-58132.1 | A-118370.1 | UAUUCUGCAACUGAAUUCGAU | 45 | A-118371.1 | AUCGAAUUCAGUUGCAGAAUAAC | 96 | NM_001735.2_ |
| UM | | | | | | | 4412-4434_as |
| AD-58091.1 | A-118372.1 | GCCCUUGGAAAGAGUAUUUCA | 46 | A-118373.1 | UGAAAUACUCUUUCCAAGGGCUU | 97 | NM_001735.2_ |
| UM | | | | | | | 1886-1908_as |
| AD-58097.1 | A-118374.1 | CCUGAUAAAAAAUUUAGUUAC | 47 | A-118375.1 | GUAACUAAAUUUUUUAUCAGGAU | 98 | NM_001735.2_ |
| UM | | | | | | | 210-232_as |
| AD-58103.1 | A-118376.1 | CCCUUGGAAAGAGUAUUUCAA | 48 | A-118377.1 | UUGAAAUACUCUUUCCAAGGGCU | 99 | NM_001735.2_ |
| UM | | | | | | | 1887-1909_as |
| AD-58121.1 | A-118382.1 | UGCAGAUCAAACACAAUUUCA | 49 | A-118383.1 | UGAAAUUGUGUUUGAUCUGCAGA | 100 | NM_010406.2_ |
| UM | | | | | | | 4943-4965_as |
| AD-58133.1 | A-118386.1 | CAGAUCAAACACAAUUUCAGU | 50 | A-118387.1 | ACUGAAAUUGUGUUUGAUCUGCA | 101 | NM_010406.2_ |
| UM | | | | | | | 4945-4967_as |
| AD-58116.1 | A-118396.1 | GUUCCGGAUAUUUGAACUUUU | 51 | A-118397.1 | AAAAGUUCAAAUAUCCGGAACCG | 102 | NM_010406.2_ |
| UM | | | | | | | 4500-4522_as |
| AD-58644.1 | A-119328.1 | AUUUAAACAACAAGUACCUUU | 52 | A-119329.1 | AAAGGUACUUGUUGUUUAAAUCU | 103 | NM_001735.2_ |
| UM | | | | | | | 982-1004_as |
| AD-58651.1 | A-119328.2 | AUUUAAACAACAAGUACCUUU | 53 | A-119339.1 | AAAGGUACUUGUUGUUUAAAUCU | 104 | NM_001735.2_ |
| UM | | | | | | | 982-1004_as |
| AD-58641.1 | A-119322.1 | UGACAAAAUAACUCACUAUAA | 54 | A-119323.1 | UUAUAGUGAGUUAUUUUGUCAAU | 105 | NM_001735.2_ |
| UM | | | | | | | 1511-1533_as |
| AD-58648.1 | A-119322.2 | UGACAAAAUAACUCACUAUAA | 55 | A-119336.1 | UUAUAGUGAGUUAUUUUGUCAAU | 106 | NM_001735.2_ |
| UM | | | | | | | 1511-1533_as |
| AD-58642.1 | A-119324.1 | GACAAAAUAACUCACUAUAAU | 56 | A-119325.1 | AUUAUAGUGAGUUAUUUUGUCAA | 107 | NM_001735.2_ |
| UM | | | | | | | 1512-1534_as |
| AD-58649.1 | A-119324.2 | GACAAAAUAACUCACUAUAAU | 57 | A-119337.1 | AUUAUAGUGAGUUAUUUUGUCAA | 108 | NM_001735.2_ |
| UM | | | | | | | 1512-1534_as |
| AD-58647.1 | A-119334.1 | GUUCCGGAUAUUUGAACUUUU | 58 | A-119335.1 | AAAAGUUCAAAUAUCCGGAACCG | 109 | NM_010406.2_ |
| UM | | | | | | | 4500-4522_as |
| AD-58654.1 | A-119334.2 | GUUCCGGAUAUUUGAACUUUU | 59 | A-119342.1 | AAAAGUUCAAAUAUCCGGAACCG | 110 | NM_010406.2_ |
| UM | | | | | | | 4500-4522_as |
| AD-58645.1 | A-119330.1 | UGCAGAUCAAACACAAUUUCA | 60 | A-119331.1 | UGAAAUUGUGUUUGAUCUGCAGA | 111 | NM_010406.2_ |
| UM | | | | | | | 4943-4965_as |
| AD-58652.1 | A-119330.2 | UGCAGAUCAAACACAAUUUCA | 61 | A-119340.1 | UGAAAUUGUGUUUGAUCUGCAGA | 112 | NM_010406.2_ |
| UM | | | | | | | 4943-4965_as |
| AD-58643.1 | A-119326.1 | AAGCAAGAUAUUUUUAUAAUA | 62 | A-119327.1 | UAUUAUAAAAAUAUCUUGCUUUU | 113 | NM_001735.2_ |
| UM | | | | | | | 784-806_as |
| AD-58650.1 | A-119326.2 | AAGCAAGAUAUUUUUAUAAUA | 63 | A-119338.1 | UAUUAUAAAAAUAUCUUGCUUUU | 114 | NM_001735.2_ |
| UM | | | | | | | 784-806_as |
| AD-58646.1 | A-119332.1 | CAGAUCAAACACAAUUUCAGU | 64 | A-119333.1 | ACUGAAAUUGUGUUUGAUCUGCA | 115 | NM_010406.2_ |
| UM | | | | | | | 4945-4967_as |
| AD-58653.1 | A-119332.2 | CAGAUCAAACACAAUUUCAGU | 65 | A-119341.1 | ACUGAAAUUGUGUUUGAUCUGCA | 116 | NM_010406.2_ |
| UM | | | | | | | 4945-4967_as |

¹The Species Oligo name reflects the GenBank record (e.g., NM_001735.2) and the position in the nucleotide
sequence of the GenBank record (e.g, 1517-1539) that the antisense strand targets.
²The number following the decimal point refers to the lot number.
³UM = unmodified

TABLE 4

| | | | SEQ | | | SEQ | Species_ |
|---|---|---|---|---|---|---|---|
| | Sense | | ID | | | ID | Oligo |
| Duplex ID | strand | Sense sequence | NO: | Antisense | Antisense sequence | NO: | name⁴ |
| AD-58093.1 | A-118310.1 | AfaUfaAfcUfcAfCfUfa | 117 | A-118311.1 | aAfgUfaAfuUfaUfaguGfaGfu | 168 | |
| | | UfaAfuUfaCfuUfL96 | | | UfaUfusUfsu | | |
| AD-58099.1 | A-118312.1 | UfgAfcAfaAfaUfAfAfc | 118 | A-118313.1 | uUfaUfaGfuGfaGfuuaUfuUfu | 169 | |
| | | UfcAfcUfaUfaAfL96 | | | GfuCfasAfsu | | |
| AD-58105.1 | A-118314.1 | CfuUfcCfuCfuGfGfAfa | 119 | A-118315.1 | aAfgGfcCfaAfuUfuccAfgAfg | 170 | |
| | | AfuUfgGfcCfuUfL96 | | | GfaAfgsCfsa | | |
| AD-58111.1 | A-118316.1 | GfaCfaAfaAfuAfAfCfu | 120 | A-118317.1 | aUfuAfuAfgUfgAfguuAfuUfu | 171 | |
| | | CfaCfuAfuAfaUfL96 | | | UfgUfcsAfsa | | |
| AD-58117.1 | A-118318.1 | UfcCfuCfuGfgAfAfAfu | 121 | A-118319.1 | uGfaAfgGfcCfaAfuuuCfcAfg | 172 | |
| | | UfgGfcCfuUfcAfL96 | | | AfgGfasAfsg | | |
| AD-58123.1 | A-118320.1 | AfaGfcAfaGfaUfAfUfu | 122 | A-118321.1 | uAfuUfaUfaAfaAfauaUfcUfu | 173 | |
| | | UfuUfaUfaAfuAfL96 | | | GfcUfusUfsu | | |
| AD-58129.1 | A-118322.1 | AfaAfaUfgUfuUfUfUfg | 123 | A-118323.1 | uGfuAfcUfuGfaCfaaaAfaCfa | 174 | |
| | | UfcAfaGfuAfcAfL96 | | | UfuUfusCfsu | | |
| AD-58088.1 | A-118324.1 | AfuUfuAfaAfcAfAfCfa | 124 | A-118325.1 | aAfaGfgUfaCfuUfguuGfuUfu | 175 | |
| | | AfgUfaCfcUfuUfL96 | | | AfaAfusCfsu | | |
| AD-58094.1 | A-118326.1 | AfuUfcAfgAfaAfGfUfc | 125 | A-118327.1 | uCfcUfuCfaCfaGfacuUfuCfu | 176 | |
| | | UfgUfgAfaGfgAfL96 | | | GfaAfusUfsu | | |
| AD-58100.1 | A-118328.1 | AfcAfcUfgAfaGfCfAfu | 126 | A-118329.1 | uUfgCfaUfcAfaAfugcUfuCfa | 177 | |
| | | UfuGfaUfgCfaAfL96 | | | GfuGfusAfsu | | |
| AD-58106.1 | A-118330.1 | GfcAfgUfuCfuGfUfGfu | 127 | A-118331.1 | gAfcAfuUfuUfaAfcacAfgAfa | 178 | |
| | | UfaAfaAfuGfuCfL96 | | | CfuGfcsAfsu | | |
| AD-58112.1 | A-118332.1 | AfgGfaUfuUfuGfAfGfu | 128 | A-118333.1 | uCfcUfuUfuAfcAfcucAfaAfa | 179 | |
| | | GfuAfaAfaGfgAfL96 | | | UfcCfusUfsu | | |
| AD-58118.1 | A-118334.1 | AfaUfgAfuGfaAfCfCfu | 129 | A-118335.1 | uUfcUfuUfaCfaAfgguUfcAfu | 180 | |
| | | UfgUfaAfaGfaAfL96 | | | CfaUfusUfsu | | |
| AD-58124.1 | A-118336.1 | AfuCfaUfuGfgAfAfCfa | 130 | A-118337.1 | aAfuGfaAfaAfaUfguuCfcAfa | 181 | |
| | | UfuUfuUfcAfuUfL96 | | | UfgAfusUfsu | | |
| AD-58130.1 | A-118338.1 | AfgCfcAfgAfaAfUfUfc | 131 | A-118339.1 | aAfuAfaCfuCfcGfaauUfuCfu | 182 | |
| | | GfgAfgUfuAfuUfL96 | | | GfgCfusUfsg | | |
| AD-58089.1 | A-118340.1 | UfcCfcUfgGfgAfGfAfu | 132 | A-118341.1 | gUfgAfgUfuUfuAfucuCfcCfa | 183 | |
| | | AfaAfaCfuCfaCfL96 | | | GfgGfasAfsa | | |
| AD-58095.1 | A-118342.1 | GfaAfaAfuGfaUfGfAfa | 133 | A-118343.1 | uUfuAfcAfaGfgUfucaUfcAfu | 184 | |
| | | CfcUfuGfuAfaAfL96 | | | UfuUfcsUfsu | | |
| AD-58101.1 | A-118344.1 | AfuUfgCfuCfaAfGfUfc | 134 | A-118345.1 | aUfcAfaAfuGfuGfacuUfgAfg | 185 | |
| | | AfcAfuUfuGfaUfL96 | | | CfaAfusUfsc | | |
| AD-58107.1 | A-118346.1 | GfaGfaUfuGfcAfUfAfu | 135 | A-118347.1 | uUfuAfuAfaGfcAfuauGfcAfa | 186 | |
| | | GfcUfuAfuAfaAfL96 | | | UfcUfcsUfsg | | |
| AD-58113.1 | A-118348.1 | GfuUfaUfcCfuGfAfUfa | 136 | A-118349.1 | uAfaAfuUfuUfuUfaucAfgGfa | 187 | |
| | | AfaAfaAfuUfuAfL96 | | | UfaAfcsUfsu | | |
| AD-58119.1 | A-118350.1 | AfgGfaAfgUfuUfGfCfa | 137 | A-118351.1 | aAfuAfaAfaGfcUfgcaAfaCfu | 188 | |
| | | GfcUfuUfuAfuUfL96 | | | UfcCfusCfsa | | |
| AD-58125.1 | A-118352.1 | GfaAfgAfaAfuUfGfAfu | 138 | A-118353.1 | uCfcAfaUfaUfgAfucaAfuUfu | 189 | |
| | | CfaUfaUfuGfgAfL96 | | | CfuUfcsUfsa | | |
| AD-58131.1 | A-118354.1 | AfuCfcUfgAfuAfAfAfa | 139 | A-118355.1 | aAfcUfaAfaUfuUfuuuAfuCfa | 190 | |
| | | AfaUfuUfaGfuUfL96 | | | GfgAfusAfsa | | |
| AD-58090.1 | A-118356.1 | UfgGfaAfaAfgAfAfAfu | 140 | A-118357.1 | uUfuAfcUfaAfgAfuuuCfuUfu | 191 | |
| | | CfuUfaGfuAfaAfL96 | | | UfcCfasAfsa | | |
| AD-58096.1 | A-118358.1 | UfcUfuAfuCfaAfAfGfu | 141 | A-118359.1 | aAfuGfuUfuAfuAfcuuUfgAfu | 192 | |
| | | AfuAfaAfcAfuUfL96 | | | AfaGfasUfsg | | |
| AD-58102.1 | A-118360.1 | UfcCfcUfaCfaAfAfCfu | 142 | A-118361.1 | aCfcAfaAfuUfcAfguuUfgUfa | 193 | |
| | | GfaAfuUfuGfgUfL96 | | | GfgGfasGfsa | | |
| AD-58108.1 | A-118362.1 | CfaGfgAfgCfaAfAfCfa | 143 | A-118363.1 | aAfuGfaCfaUfaUfguuUfgCfu | 194 | |
| | | UfaUfgUfcAfuUfL96 | | | CfcUfgsUfsc | | |
| AD-58114.1 | A-118364.1 | AfcAfuGfuAfaCfAfAfc | 144 | A-118365.1 | uGfaAfcUfaCfaGfuugUfuAfc | 195 | |
| | | UfgUfaGfuUfcAfL96 | | | AfuGfusAfsc | | |
| AD-58120.1 | A-118366.1 | CfaGfgAfaAfuCfAfUfu | 145 | A-118367.1 | aAfaUfgUfuCfcAfaugAfuUfu | 196 | |
| | | GfgAfaCfaUfuUfL96 | | | CfcUfgsUfsu | | |
| AD-58126.1 | A-118368.1 | UfuUfaAfgAfaUfUfUfu | 146 | A-118369.1 | aGfuAfaUfuUfcAfaaaUfuCfu | 197 | |
| | | GfaAfaUfuAfcUfL96 | | | UfaAfasGfsu | | |
| AD-58132.1 | A-118370.1 | UfaUfuCfuGfcAfAfCfu | 147 | A-118371.1 | aUfcGfaAfuUfcAfguuGfcAfg | 198 | |
| | | GfaAfuUfcGfaUfL96 | | | AfaUfasAfsc | | |
| AD-58091.1 | A-118372.1 | GfcCfcUfuGfgAfAfAfg | 148 | A-118373.1 | uGfaAfaUfaCfuCfuuuCfcAfa | 199 | |
| | | AfgUfaUfuUfcAfL96 | | | GfgGfcsUfsu | | |
| AD-58097.1 | A-118374.1 | CfcUfgAfuAfaAfAfAfa | 149 | A-118375.1 | gUfaAfcUfaAfaUfuuuUfuAfu | 200 | |
| | | UfuUfaGfuUfaCfL96 | | | CfaGfgsAfsu | | |
| AD-58103.1 | A-118376.1 | CfcCfuUfgGfaAfAfGfa | 150 | A-118377.1 | uUfgAfaAfuAfcUfcuuUfcCfa | 201 | |
| | | GfuAfuUfuCfaAfL96 | | | AfgGfgsCfsu | | |
| AD-58121.1 | A-118382.1 | UfgCfaGfaUfcAfAfAfc | 151 | A-118383.1 | uGfaAfaUfuGfuGfuuuGfaUfc | 202 | |
| | | AfcAfaUfuUfcAfL96 | | | UfgCfasGfsa | | |
| AD-58133.1 | A-118386.1 | CfaGfaUfcAfaAfCfAfc | 152 | A-118387.1 | aCfuGfaAfaUfuGfuguUfuGfa | 203 | |
| | | AfaUfuUfcAfgUfL96 | | | UfcUfgsCfsa | | |
| AD-58116.1 | A-118396.1 | GfuUfcCfgGfaUfAfUfu | 153 | A-118397.1 | aAfaAfgUfuCfaAfauaUfcCfg | 204 | |
| | | UfgAfaCfuUfuUfL96 | | | GfaAfcsCfsg | | |
| AD-58644.1 | A-119328.1 | AfsusUfuAfaAfcAfAfC | 154 | A-119329.1 | asAfsaGfgUfaCfuUfguuGfuU | 205 | |
| | | faAfgUfaCfcUfuUfL96 | | | fuAfaAfuscsu | | |
| AD-58651.1 | A-119328.2 | AfsusUfuAfaAfcAfAfC | 155 | A-119339.1 | asAfsaGfsgUfsaCfsuUfsguu | 206 | |
| | | faAfgUfaCfcUfuUfL96 | | | GfsuUfsuAfsaAfsuscsu | | |
| AD-58641.1 | A-119322.1 | UfsgsAfcAfaAfaUfAfA | 156 | A-119323.1 | usUfsaUfaGfuGfaGfuuaUfuU | 207 | |
| | | fcUfcAfcUfaUfaAfL96 | | | fuGfuCfasasu | | |
| AD-58648.1 | A-119322.2 | UfsgsAfcAfaAfaUfAfA | 157 | A-119336.1 | usUfsaUfsaGfsuGfsaGfsuua | 208 | |
| | | fcUfcAfcUfaUfaAfL96 | | | UfsuUfsuGfsuCfsasasu | | |
| AD-58642.1 | A-119324.1 | GfsasCfaAfaAfuAfAfC | 158 | A-119325.1 | asUfsuAfuAfgUfgAfguuAfuU | 209 | |
| | | fuCfaCfuAfuAfaUfL96 | | | fuUfgUfcsasa | | |
| AD-58649.1 | A-119324.2 | GfsasCfaAfaAfuAfAfC | 159 | A-119337.1 | asUfsuAfsuAfsgUfsgAfsguu | 210 | |
| | | fuCfaCfuAfuAfaUfL96 | | | AfsuUfsuUfsgUfscsasa | | |
| AD-58647.1 | A-119334.1 | GfsusUfcCfgGfaUfAfU | 160 | A-119335.1 | asAfsaAfgUfuCfaAfauaUfcC | 211 | |
| | | fuUfgAfaCfuUfuUfL96 | | | fgGfaAfcscsg | | |
| AD-58654.1 | A-119334.2 | GfsusUfcCfgGfaUfAfU | 161 | A-119342.1 | asAfsaAfsgUfsuCfsaAfsaua | 212 | |
| | | fuUfgAfaCfuUfuUfL96 | | | UfscCfsgGfsaAfscscsg | | |
| AD-58645.1 | A-119330.1 | UfsgsCfaGfaUfcAfAfA | 162 | A-119331.1 | usGfsaAfaUfuGfuGfuuuGfaU | 213 | |
| | | fcAfcAfaUfuUfcAfL96 | | | fcUfgCfasgsa | | |
| AD-58652.1 | A-119330.2 | UfsgsCfaGfaUfcAfAfA | 163 | A-119340.1 | usGfsaAfsaUfsuGfsuGfsuuu | 214 | |
| | | fcAfcAfaUfuUfcAfL96 | | | GfsaUfscUfsgCfsasgsa | | |
| AD-58643.1 | A-119326.1 | AfsasGfcAfaGfaUfAfU | 164 | A-119327.1 | usAfsuUfaUfaAfaAfauaUfcU | 215 | |
| | | fuUfuUfaUfaAfuAfL96 | | | fuGfcUfususu | | |
| AD-58650.1 | A-119326.2 | AfsasGfcAfaGfaUfAfU | 165 | A-119338.1 | usAfsuUfsaUfsaAfsaAfsaua | 216 | |
| | | fuUfuUfaUfaAfuAfL96 | | | UfscUfsuGfscUfsususu | | |
| AD-58646.1 | A-119332.1 | CfsasGfaUfcAfaAfCfA | 166 | A-119333.1 | asCfsuGfaAfaUfuGfuguUfuG | 217 | |
| | | fcAfaUfuUfcAfgUfL96 | | | faUfcUfgscsa | | |
| AD-58653.1 | A-119332.2 | CfsasGfaUfcAfaAfCfA | 167 | A-119341.1 | asCfsuGfsaAfsaUfsuGfsugu | 218 | |
| | | fcAfaUfuUfcAfgUfL96 | | | UfsuGfsaUfscUfsgscsa | | |

⁴The Species Oligo name and the position in the nucleotide sequence of the GenBank record that the
antisense strand targets correspond to those shown in Table 3.

TABLE 5
Unmodified Sense and Antisense Strand Sequences of C5 dsRNAs

| | | | SEQ | | | SEQ | |
|---|---|---|---|---|---|---|---|
| | Sense | Sense Unmodified | ID | | Antisense | ID | Species_ |
| Duplex ID | strand | Sequence | NO: | Antisense | Unmodifed Sequence | NO: | Oligo name |
| AD-58143.1 | A-118423.1 | CACUAUAAUUACUUGAUUU | 219 | A-118424.1 | AAAUCAAGUAAUUAUAGUG | 302 | NM_001735.2_ |
| UM | | | | | | | 1522-1540_as |
| AD-58149.1 | A-118425.1 | UAACUCACUAUAAUUACUU | 220 | A-118426.1 | AAGUAAUUAUAGUGAGUUA | 303 | NM_001735.2_ |
| UM | | | | | | | 1517-1535_as |
| AD-8155.1 | A-118427.1 | ACAAAAUAACUCACUAUAA | 221 | A-118428.1 | UUAUAGUGAGUUAUUUUGU | 304 | NM_001735.2_ |
| UM | | | | | | | 1511-1529_as |
| AD-58161.1 | A-118429.1 | UCCUCUGGAAAUUGGCCUU | 222 | A-118430.1 | AAGGCCAAUUUCCAGAGGA | 305 | NM_001735.2_ |
| UM | | | | | | | 2733-2751_as |
| AD-58167.1 | A-118431.1 | CAAAAUAACUCACUAUAAU | 223 | A-118432.1 | AUUAUAGUGAGUUAUUUUG | 306 | NM_001735.2_ |
| UM | | | | | | | 1512-1530_as |
| AD-58173.1 | A-118433.1 | CUCUGGAAAUUGGCCUUCA | 224 | A-118434.1 | UGAAGGCCAAUUUCCAGAG | 307 | NM_001735.2_ |
| UM | | | | | | | 2735-2753_as |
| AD-58179.1 | A-118435.1 | GCAAGAUAUUUUUAUAAUA | 225 | A-118436.1 | UAUUAUAAAAAUAUCUUGC | 308 | NM_001735.2_ |
| UM | | | | | | | 784-802_as |
| AD-58185.1 | A-118437.1 | AAUGUUUUUGUCAAGUACA | 226 | A-118438.1 | UGUACUUGACAAAAACAUU | 309 | NM_001735.2_ |
| UM | | | | | | | 4744-4762_as |
| AD-58144.1 | A-118439.1 | UUAAACAACAAGUACCUUU | 227 | A-118440.1 | AAAGGUACUUGUUGUUUAA | 310 | NM_001735.2_ |
| UM | | | | | | | 982-1000_as |
| AD-58150.1 | A-118441.1 | UCAGAAAGUCUGUGAAGGA | 228 | A-118442.1 | UCCUUCACAGACUUUCUGA | 311 | NM_001735.2_ |
| UM | | | | | | | 4578-4596_as |
| AD-58156.1 | A-118443.1 | ACUGAAGCAUUUGAUGCAA | 229 | A-118444.1 | UUGCAUCAAAUGCUUCAGU | 312 | NM_001735.2_ |
| UM | | | | | | | 169-187_as |
| AD-58162.1 | A-118445.1 | AGUUCUGUGUUAAAAUGUC | 230 | A-118446.1 | GACAUUUUAACACAGAACU | 313 | NM_001735.2_ |
| UM | | | | | | | 2591-2609_as |
| AD-58168.1 | A-118447.1 | GAUUUUGAGUGUAAAAGGA | 231 | A-118448.1 | UCCUUUUACACUCAAAAUC | 314 | NM_001735.2_ |
| UM | | | | | | | 2955-2973_as |
| AD-58174.1 | A-118449.1 | UGAUGAACCUUGUAAAGAA | 232 | A-118450.1 | UUCUUUACAAGGUUCAUCA | 315 | NM_001735.2_ |
| UM | | | | | | | 2025-2043_as |
| AD-58180.1 | A-118451.1 | CAUUGGAACAUUUUUCAUU | 233 | A-118452.1 | AAUGAAAAAUGUUCCAAUG | 316 | NM_001735.2_ |
| UM | | | | | | | 3118-3136_as |
| AD-58186.1 | A-118453.1 | CCAGAAAUUCGGAGUUAUU | 234 | A-118454.1 | AAUAACUCCGAAUUUCUGG | 317 | NM_001735.2_ |
| UM | | | | | | | 2317-2335_as |
| AD-58145.1 | A-118455.1 | CCUGGGAGAUAAAACUCAC | 235 | A-118456.1 | GUGAGUUUUAUCUCCCAGG | 318 | NM_001735.2_ |
| UM | | | | | | | 3618-3636_as |
| AD-58151.1 | A-118457.1 | AAAUGAUGAACCUUGUAAA | 236 | A-118458.1 | UUUACAAGGUUCAUCAUUU | 319 | NM_001735.2_ |
| UM | | | | | | | 2022-2040_as |
| AD-58157.1 | A-118459.1 | UGCUCAAGUCACAUUUGAU | 237 | A-118460.1 | AUCAAAUGUGACUUGAGCA | 320 | NM_001735.2_ |
| UM | | | | | | | 918-936_as |
| AD-58163.1 | A-118461.1 | GAUUGCAUAUGCUUAUAAA | 238 | A-118462.1 | UUUAUAAGCAUAUGCAAUC | 321 | NM_001735.2_ |
| UM | | | | | | | 4698-4716_as |
| AD-58169.1 | A-118463.1 | UAUCCUGAUAAAAAAUUUA | 239 | A-118464.1 | UAAAUUUUUUAUCAGGAUA | 322 | NM_001735.2_ |
| UM | | | | | | | 205-223_as |
| AD-58175.1 | A-118465.1 | GAAGUUUGCAGCUUUUAUU | 240 | A-118466.1 | AAUAAAAGCUGCAAACUUC | 323 | NM_001735.2_ |
| UM | | | | | | | 4147-4165_as |
| AD-58181.1 | A-118467.1 | AGAAAUUGAUCAUAUUGGA | 241 | A-118468.1 | UCCAAUAUGAUCAAUUUCU | 324 | NM_001735.2_ |
| UM | | | | | | | 555-573_as |
| AD-58187.1 | A-118469.1 | CCUGAUAAAAAAUUUAGUU | 242 | A-118470.1 | AACUAAAUUUUUUAUCAGG | 325 | NM_001735.2_ |
| UM | | | | | | | 208-226_as |
| AD-58146.1 | A-118471.1 | GAAAAGAAAUCUUAGUAAA | 243 | A-118472.1 | UUUACUAAGAUUUCUUUUC | 326 | NM_001735.2_ |
| UM | | | | | | | 2786-2804_as |
| AD-58152.1 | A-118473.1 | UUAUCAAAGUAUAAACAUU | 244 | A-118474.1 | AAUGUUUAUACUUUGAUAA | 327 | NM_001735.2_ |
| UM | | | | | | | 1596-1614_as |
| AD-58158.1 | A-118475.1 | CCUACAAACUGAAUUUGGU | 245 | A-118476.1 | ACCAAAUUCAGUUUGUAGG | 328 | NM_001735.2_ |
| UM | | | | | | | 1082-1100_as |
| AD-58164.1 | A-118477.1 | GGAGCAAACAUAUGUCAUU | 246 | A-118478.1 | AAUGACAUAUGUUUGCUCC | 329 | NM_001735.2_ |
| UM | | | | | | | 87-105_as |
| AD-58171.1 | A-118479.1 | AUGUAACAACUGUAGUUCA | 247 | A-118480.1 | UGAACUACAGUUGUUACAU | 330 | NM_001735.2_ |
| UM | | | | | | | 4109-4127_as |
| AD-58176.1 | A-118481.1 | GGAAAUCAUUGGAACAUUU | 248 | A-118482.1 | AAAUGUUCCAAUGAUUUCC | 331 | NM_001735.2_ |
| UM | | | | | | | 3112-3130_as |
| AD-58182.1 | A-118483.1 | UAAGAAUUUUGAAAUUACU | 249 | A-118484.1 | AGUAAUUUCAAAAUUCUUA | 332 | NM_001735.2_ |
| UM | | | | | | | 759-777_as |
| AD-58188.1 | A-118485.1 | UUCUGCAACUGAAUUCGAU | 250 | A-118486.1 | AUCGAAUUCAGUUGCAGAA | 333 | NM_001735.2_ |
| UM | | | | | | | 4412-4430_as |
| AD-58147.1 | A-118487.1 | CCUUGGAAAGAGUAUUUCA | 251 | A-118488.1 | UGAAAUACUCUUUCCAAGG | 334 | NM_001735.2_ |
| UM | | | | | | | 1886-1904_as |
| AD-58153.1 | A-118489.1 | UGAUAAAAAAUUUAGUUAC | 252 | A-118490.1 | GUAACUAAAUUUUUUAUCA | 335 | NM_001735.2_ |
| UM | | | | | | | 210-228_as |
| AD-58159.1 | A-118491.1 | CUUGGAAAGAGUAUUUCAA | 253 | A-118492.1 | UUGAAAUACUCUUUCCAAG | 336 | NM_001735.2_ |
| UM | | | | | | | 1887-1905_as |
| AD-58190.1 | A-118519.1 | CACUAUAAUUACUUGAUUU | 254 | A-118520.1 | AAAUCAAGUAAUUAUAGUG | 337 | NM_001735.2_ |
| UM | | | | | | | 1522-1540_as |
| AD-58196.1 | A-118521.1 | UAACUCACUAUAAUUACUU | 255 | A-118522.1 | AAGUAAUUAUAGUGAGUUA | 338 | NM_001735.2_ |
| UM | | | | | | | |
| AD-58202.1 | A-118523.1 | ACAAAAUAACUCACUAUAA | 256 | A-118524.1 | UUAUAGUGAGUUAUUUUGU | 339 | NM_001735.2_ |
| UM | | | | | | | |
| AD-58208.1 | A-118525.1 | UCCUCUGGAAAUUGGCCUU | 257 | A-118526.1 | AAGGCCAAUUUCCAGAGGA | 340 | NM_001735.2_ |
| UM | | | | | | | |
| AD-58214.1 | A-118527.1 | CAAAAUAACUCACUAUAAU | 258 | A-118528.1 | AUUAUAGUGAGUUAUUUUG | 341 | NM_001735.2_ |
| UM | | | | | | | |
| AD-58220.1 | A-118529.1 | CUCUGGAAAUUGGCCUUCA | 259 | A-118530.1 | UGAAGGCCAAUUUCCAGAG | 342 | NM_001735.2_ |
| UM | | | | | | | |
| AD-58226.1 | A-118531.1 | GCAAGAUAUUUUUAUAAUA | 260 | A-118532.1 | UAUUAUAAAAAUAUCUUGC | 343 | NM_001735.2_ |
| UM | | | | | | | |
| AD-58231.1 | A-118533.1 | AAUGUUUUUGUCAAGUACA | 261 | A-118534.1 | UGUACUUGACAAAAACAUU | 344 | NM_001735.2_ |
| UM | | | | | | | |
| AD-59191.1 | A-118535.1 | UUAAACAACAAGUACCUUU | 262 | A-118536.1 | AAAGGUACUUGUUGUUUAA | 345 | NM_001735.2_ |
| UM | | | | | | | |
| AD-58197.1 | A-118537.1 | UCAGAAAGUCUGUGAAGGA | 263 | A-118538.1 | UCCUUCACAGACUUUCUGA | 346 | NM_001735.2_ |
| UM | | | | | | | |
| AD-58203.1 | A-118539.1 | ACUGAAGCAUUUGAUGCAA | 264 | A-118540.1 | UUGCAUCAAAUGCUUCAGU | 347 | NM_001735.2_ |
| UM | | | | | | | |
| AD-58209.1 | A-118541.1 | AGUUCUGUGUUAAAAUGUC | 265 | A-118542.1 | GACAUUUUAACACAGAACU | 348 | NM_001735.2_ |
| UM | | | | | | | |
| AD-58233.1 | A-118564.1 | CACUAUAAUUACUUGAUUU | 266 | A-118566.1 | AAAUCAAGUAAUUAUAGUG | 349 | NM_001735.2_ |
| UM | | | | | | | |
| AD-58193.1 | A-118567.1 | UAACUCACUAUAAUUACUU | 267 | A-118568.1 | AAGUAAUUAUAGUGAGUUA | 350 | NM_001735.2_ |
| UM | | | | | | | |
| AD-58199.1 | A-118569.1 | ACAAAAUAACUCACUAUAA | 268 | A-118570.1 | UUAUAGUGAGUUAUUUUGU | 351 | NM_001735.2_ |
| UM | | | | | | | |
| AD-58205.1 | A-118571.1 | UCCUCUGGAAAUUGGCCUU | 269 | A-118572.1 | AAGGCCAAUUUCCAGAGGA | 352 | NM_001735.2_ |
| UM | | | | | | | |
| AD-58211.1 | A-118573.1 | CAAAAUAACUCACUAUAAU | 270 | A-118574.1 | AUUAUAGUGAGUUAUUUUG | 353 | NM_001735.2_ |
| UM | | | | | | | |
| AD-58217.1 | A-118575.1 | CUCUGGAAAUUGGCCUUCA | 271 | A-118576.1 | UGAAGGCCAAUUUCCAGAG | 354 | NM_001735.2_ |
| UM | | | | | | | |
| AD-58223.1 | A-118577.1 | GCAAGAUAUUUUUAUAAUA | 272 | A-118578.1 | UAUUAUAAAAAUAUCUUGC | 355 | NM_001735.2_ |
| UM | | | | | | | |
| AD-58229.1 | A-118579.1 | AAUGUUUUUGUCAAGUACA | 273 | A-118580.1 | UGUACUUGACAAAAACAUU | 356 | NM_001735.2_ |
| UM | | | | | | | |
| AD-58234.1 | A-118581.1 | UUAAACAACAAGUACCUUU | 274 | A-118582.1 | AAAGGUACUUGUUGUUUAA | 357 | NM_001735.2_ |
| UM | | | | | | | |
| AD-58194.1 | A-118583.1 | UCAGAAAGUCUGUGAAGGA | 275 | A-118584.1 | UCCUUCACAGACUUUCUGA | 358 | NM_001735.2_ |
| UM | | | | | | | |
| AD-58200.1 | A-118585.1 | ACUGAAGCAUUUGAUGCAA | 276 | A-118586.1 | UUGCAUCAAAUGCUUCAGU | 359 | NM_001735.2_ |
| UM | | | | | | | |
| AD-58206.1 | A-118587.1 | AGUUCUGUGUUAAAAUGUC | 277 | A-118588.1 | GACAUUUUAACACAGAACU | 360 | NM_001735.2_ |
| UM | | | | | | | |
| AD-58236.1 | A-118423.2 | CACUAUAAUUACUUGAUUU | 278 | A-118644.1 | AAAUCAAGUAAUUAUAGUG | 361 | NM_001735.2_ |
| UM | | | | | | | |
| AD-58242.1 | A-118425.2 | UAACUCACUAUAAUUACUU | 279 | A-118645.1 | AAGUAAUUAUAGUGAGUUA | 362 | NM_001735.2_ |
| UM | | | | | | | |
| AD-58248.1 | A-118427.2 | ACAAAAUAACUCACUAUAA | 280 | A-118646.1 | UUAUAGUGAGUUAUUUUGU | 363 | NM_001735.2_ |
| UM | | | | | | | |
| AD-58254.1 | A-118429.2 | UCCUCUGGAAAUUGGCCUU | 281 | A-118647.1 | AAGGCCAAUUUCCAGAGGA | 364 | NM_001735.2_ |
| UM | | | | | | | |
| AD-58260.1 | A-118431.2 | CAAAAUAACUCACUAUAAU | 282 | A-118648.1 | AUUAUAGUGAGUUAUUUUG | 365 | NM_001735.2_ |
| UM | | | | | | | |
| AD-58266.1 | A-118433.2 | CUCUGGAAAUUGGCCUUCA | 283 | A-118649.1 | UGAAGGCCAAUUUCCAGAG | 366 | NM_001735.2_ |
| UM | | | | | | | |
| AD-58272.1 | A-118435.2 | GCAAGAUAUUUUUAUAAUA | 284 | A-118650.1 | UAUUAUAAAAAUAUCUUGC | 367 | NM_001735.2_ |
| UM | | | | | | | |
| AD-58277.1 | A-118437.2 | AAUGUUUUUGUCAAGUACA | 285 | A-118651.1 | UGUACUUGACAAAAACAUU | 368 | NM_001735.2_ |
| UM | | | | | | | |
| AD-58237.1 | A-118439.2 | UUAAACAACAAGUACCUUU | 286 | A-118652.1 | AAAGGUACUUGUUGUUUAA | 369 | NM_001735.2_ |
| UM | | | | | | | |
| AD-58243.1 | A-118441.2 | UCAGAAAGUCUGUGAAGGA | 287 | A-118653.1 | UCCUUCACAGACUUUCUGA | 370 | NM_001735.2_ |
| UM | | | | | | | |
| AD-58249.1 | A-118443.2 | ACUGAAGCAUUUGAUGCAA | 288 | A-118654.1 | UUGCAUCAAAUGCUUCAGU | 371 | NM_001735.2_ |
| UM | | | | | | | |
| AD-58255.1 | A-118445.2 | AGUUCUGUGUUAAAAUGUC | 289 | A-118655.1 | GACAUUUUAACACAGAACU | 372 | NM_001735.2_ |
| UM | | | | | | | |
| AD-58279.1 | A-118423.3 | CACUAUAAUUACUUGAUUU | 290 | A-118667.1 | AAAUCAAGUAAUUAUAGUG | 373 | NM_001735.2_ |
| UM | | | | | | | |
| AD-58239.1 | A-118425.3 | UAACUCACUAUAAUUACUU | 291 | A-118668.1 | AAGUAAUUAUAGUGAGUUA | 374 | NM_001735.2_ |
| UM | | | | | | | |
| AD-58245.1 | A-118427.3 | ACAAAAUAACUCACUAUAA | 292 | A-118669.1 | UUAUAGUGAGUUAUUUUGU | 375 | NM_001735.2_ |
| UM | | | | | | | |
| AD-58251.1 | A-118429.3 | UCCUCUGGAAAUUGGCCUU | 293 | A-118670.1 | AAGGCCAAUUUCCAGAGGA | 376 | NM_001735.2_ |
| UM | | | | | | | |
| AD-58257.1 | A-118431.3 | CAAAAUAACUCACUAUAAU | 294 | A-118671.1 | AUUAUAGUGAGUUAUUUUG | 377 | NM_001735.2_ |
| UM | | | | | | | |
| AD-58263.1 | A-118433.3 | CUCUGGAAAUUGGCCUUCA | 295 | A-118672.1 | UGAAGGCCAAUUUCCAGAG | 378 | NM_001735.2_ |
| UM | | | | | | | |
| AD-58269.1 | A-118435.3 | GCAAGAUAUUUUUAUAAUA | 296 | A-118673.1 | UAUUAUAAAAAUAUCUUGC | 379 | NM_001735.2_ |
| UM | | | | | | | |
| AD-58275.1 | A-118437.3 | AAUGUUUUUGUCAAGUACA | 297 | A-118674.1 | UGUACUUGACAAAAACAUU | 380 | NM_001735.2_ |
| UM | | | | | | | |
| AD-58280.1 | A-118439.3 | UUAAACAACAAGUACCUUU | 298 | A-118675.1 | AAAGGUACUUGUUGUUUAA | 381 | NM_001735.2_ |
| UM | | | | | | | |
| AD-58240.1 | A-118441.3 | UCAGAAAGUCUGUGAAGGA | 299 | A-118676.1 | UCCUUCACAGACUUUCUGA | 382 | NM_001735.2_ |
| UM | | | | | | | |
| AD-58246.1 | A-118443.3 | ACUGAAGCAUUUGAUGCAA | 300 | A-118677.1 | UUGCAUCAAAUGCUUCAGU | 383 | NM_001735.2_ |
| UM | | | | | | | |
| AD-58252.1 | A-118445.3 | AGUUCUGUGUUAAAAUGUC | 301 | A-118678.1 | GACAUUUUAACACAGAACU | 384 | NM_001735.2_ |
| UM | | | | | | | |

TABLE 6
Modified Sense and Antisense Strand Sequences of C5 dsRNAs

| | | | SEQ | | | SEQ | Species_ |
|---|---|---|---|---|---|---|---|
| | Sense | | ID | | | ID | Oligo |
| Duplex ID | strand | Sense Sequence | NO: | Antisense | Antisense sequence | NO: | name⁵ |
| AD-58143.1 | A-118423.1 | cAcuAuAAuuAcuuGAuuudTsdT | 385 | A-118424.1 | AAAUcAAGuAAUuAuAGUGdTsdT | 468 | |
| AD-58149.1 | A-118425.1 | uAAcucAcuAuAAuuAcuudTsdT | 386 | A-118426.1 | AAGuAAUuAuAGUGAGUuAdTsdT | 469 | |
| AD-58155.1 | A-118427.1 | AcAAAAuAAcucAcuAuAAdTsdT | 387 | A-118428.1 | UuAuAGUGAGUuAUUUUGUdTsdT | 470 | |
| AD-58161.1 | A-118429.1 | uccucuGGAAAuuGGccuudTsdT | 388 | A-118430.1 | AAGGCcAAUUUCcAGAGGAdTsdT | 471 | |
| AD-58167.1 | A-118431.1 | cAAAAuAAcucAcuAuAAudTsdT | 389 | A-118432.1 | AUuAuAGUGAGUuAUUUUGdTsdT | 472 | |
| AD-58173.1 | A-118433.1 | cucuGGAAAuuGGccuucAdTsdT | 390 | A-118434.1 | UGAAGGCcAAUUUCcAGAGdTsdT | 473 | |
| AD-58179.1 | A-118435.1 | GcAAGAuAuuuuuAuAAuAdTsdT | 391 | A-118436.1 | uAUuAuAAAAAuAUCUUGCdTsdT | 474 | |
| AD-58185.1 | A-118437.1 | AAuGuuuuuGucAAGuAcAdTsdT | 392 | A-118438.1 | UGuACUUGAcAAAAAcAUUdTsdT | 475 | |
| AD-58144.1 | A-118439.1 | uuAAAcAAcAAGuAccuuudTsdT | 393 | A-118440.1 | AAAGGuACUUGUUGUUuAAdTsdT | 476 | |
| AD-58150.1 | A-118441.1 | ucAGAAAGucuGuGAAGGAdTsdT | 394 | A-118442.1 | UCCUUcAcAGACUUUCUGAdTsdT | 477 | |
| AD-58156.1 | A-118443.1 | AcuGAAGcAuuuGAuGcAAdTsdT | 395 | A-118444.1 | UUGcAUcAAAUGCUUcAGUdTsdT | 478 | |
| AD-58162.1 | A-118445.1 | AGuucuGuGuuAAAAuGucdTsdT | 396 | A-118446.1 | GAcAUUUuAAcAcAGAACUdTsdT | 479 | |
| AD-58168.1 | A-118447.1 | GAuuuuGAGuGuAAAAGGAdTsdT | 397 | A-118448.1 | UCCUUUuAcACUcAAAAUCdTsdT | 480 | |
| AD-58174.1 | A-118449.1 | uGAuGAAccuuGuAAAGAAdTsdT | 398 | A-118450.1 | UUCUUuAcAAGGUUcAUcAdTsdT | 481 | |
| AD-58180.1 | A-118451.1 | cAuuGGAAcAuuuuucAuudTsdT | 399 | A-118452.1 | AAUGAAAAAUGUUCcAAUGdTsdT | 482 | |
| AD-58186.1 | A-118453.1 | ccAGAAAuucGGAGuuAuudTsdT | 400 | A-118454.1 | AAuAACUCCGAAUUUCUGGdTsdT | 483 | |
| AD-58145.1 | A-118455.1 | ccuGGGAGAuAAAAcucAcdTsdT | 401 | A-118456.1 | GUGAGUUUuAUCUCCcAGGdTsdT | 484 | |
| AD-58151.1 | A-118457.1 | AAAuGAuGAAccuuGuAAAdTsdT | 402 | A-118458.1 | UUuAcAAGGUUcAUcAUUUdTsdT | 485 | |
| AD-58157.1 | A-118459.1 | uGcucAAGucAcAuuuGAudTsdT | 403 | A-118460.1 | AUcAAAUGUGACUUGAGcAdTsdT | 486 | |
| AD-58163.1 | A-118461.1 | GAuuGcAuAuGcuuAuAAAdTsdT | 404 | A-118462.1 | UUuAuAAGcAuAUGcAAUCdTsdT | 487 | |
| AD-58169.1 | A-118463.1 | uAuccuGAuAAAAAAuuuAdTsdT | 405 | A-118464.1 | uAAAUUUUUuAUcAGGAuAdTsdT | 488 | |
| AD-58175.1 | A-118465.1 | GAAGuuuGcAGcuuuuAuudTsdT | 406 | A-118466.1 | AAuAAAAGCUGcAAACUUCdTsdT | 489 | |
| AD-58181.1 | A-118467.1 | AGAAAuuGAucAuAuuGGAdTsdT | 407 | A-118468.1 | UCcAAuAUGAUcAAUUUCUdTsdT | 490 | |
| AD-58187.1 | A-118469.1 | ccuGAuAAAAAAuuuAGuudTsdT | 408 | A-118470.1 | AACuAAAUUUUUuAUcAGGdTsdT | 491 | |
| AD-58146.1 | A-118471.1 | GAAAAGAAAucuuAGuAAAdTsdT | 409 | A-118472.1 | UUuACuAAGAUUUCUUUUCdTsdT | 492 | |
| AD-58152.1 | A-118473.1 | uuAucAAAGuAuAAAcAuudTsdT | 410 | A-118474.1 | AAUGUUuAuACUUUGAuAAdTsdT | 493 | |
| AD-58158.1 | A-118475.1 | ccuAcAAAcuGAAuuuGGudTsdT | 411 | A-118476.1 | ACcAAAUUcAGUUUGuAGGdTsdT | 494 | |
| AD-58164.1 | A-118477.1 | GGAGcAAAcAuAuGucAuudTsdT | 412 | A-118478.1 | AAUGAcAuAUGUUUGCUCCdTsdT | 495 | |
| AD-58170.1 | A-118479.1 | AuGuAAcAAcuGuAGuucAdTsdT | 413 | A-118480.1 | UGAACuAcAGUUGUuAcAUdTsdT | 496 | |
| AD-58176.1 | A-118481.1 | GGAAAucAuuGGAAcAuuudTsdT | 414 | A-118482.1 | AAAUGUUCcAAUGAUUUCCdTsdT | 497 | |
| AD-58182.1 | A-118483.1 | uAAGAAuuuuGAAAuuAcudTsdT | 415 | A-118484.1 | AGuAAUUUcAAAAUUCUuAdTsdT | 498 | |
| AD-58188.1 | A-118485.1 | uucuGcAAcuGAAuucGAudTsdT | 416 | A-118486.1 | AUCGAAUUcAGUUGcAGAAdTsdT | 499 | |
| AD-58147.1 | A-118487.1 | ccuuGGAAAGAGuAuuucAdTsdT | 417 | A-118488.1 | UGAAAuACUCUUUCcAAGGdTsdT | 500 | |
| AD-58153.1 | A-118489.1 | uGAuAAAAAAuuuAGuuAcdTsdT | 418 | A-118490.1 | GuAACuAAAUUUUUuAUcAdTsdT | 501 | |
| AD-58159.1 | A-118491.1 | cuuGGAAAGAGuAuuucAAdTsdT | 419 | A-118492.1 | UUGAAAuACUCUUUCcAAGdTsdT | 502 | |
| AD-58190.1 | A-118519.1 | CACUAUAAUUACUUGAUUUdTdT | 420 | A-118520.1 | AAAUCAAGUAAUUAUAGUGdTdT | 503 | |
| AD-58196.1 | A-118521.1 | UAACUCACUAUAAUUACUUdTdT | 421 | A-118522.1 | AAGUAAUUAUAGUGAGUUAdTdT | 504 | |
| AD-58202.1 | A-118523.1 | ACAAAAUAACUCACUAUAAdTdT | 422 | A-118524.1 | UUAUAGUGAGUUAUUUUGUdTdT | 505 | |
| AD-58208.1 | A-118525.1 | UCCUCUGGAAAUUGGCCUUdTdT | 423 | A-118526.1 | AAGGCCAAUUUCCAGAGGAdTdT | 506 | |
| AD-58214.1 | A-118527.1 | CAAAAUAACUCACUAUAAUdTdT | 424 | A-118528.1 | AUUAUAGUGAGUUAUUUUGdTdT | 507 | |
| AD-58220.1 | A-118529.1 | CUCUGGAAAUUGGCCUUCAdTdT | 425 | A-118530.1 | UGAAGGCCAAUUUCCAGAGdTdT | 508 | |
| AD-58226.1 | A-118531.1 | GCAAGAUAUUUUUAUAAUAdTdT | 426 | A-118532.1 | UAUUAUAAAAAUAUCUUGCdTdT | 509 | |
| AD-58231.1 | A-118533.1 | AAUGUUUUUGUCAAGUACAdTdT | 427 | A-118534.1 | UGUACUUGACAAAAACAUUdTdT | 510 | |
| AD-58191.1 | A-118535.1 | UUAAACAACAAGUACCUUUdTdT | 428 | A-118536.1 | AAAGGUACUUGUUGUUUAAdTdT | 511 | |
| AD-58197.1 | A-118537.1 | UCAGAAAGUCUGUGAAGGAdTdT | 429 | A-118538.1 | UCCUUCACAGACUUUCUGAdTdT | 512 | |
| AD-58203.1 | A-118539.1 | ACUGAAGCAUUUGAUGCAAdTdT | 430 | A-118540.1 | UUGCAUCAAAUGCUUCAGUdTdT | 513 | |
| AD-58209.1 | A-118541.1 | AGUUCUGUGUUAAAAUGUCdTdT | 431 | A-118542.1 | GACAUUUUAACACAGAACUdTdT | 514 | |
| AD-58233.1 | A-118565.1 | CfACfUfAUfAAUfUfACfUfUf | 432 | A-118566.1 | AAAUCfAAGUfAAUUfAUfAGUGd | 515 | |
| | | GAUfUfUfdTsdT | | | TsdT | | |
| AD-58193.1 | A-118567.1 | UfAACfUiCfACfUfAUfAAUfU | 433 | A-118568.1 | AAGUfAAUUfAUfAGUGAGUUfAd | 516 | |
| | | fACfUfUfdTsdT | | | TsdT | | |
| AD-58199.1 | A-118569.1 | ACfAAAAUfAACfUfCfACfUfA | 434 | A-118570.1 | UUfAUfAGUGAGUUfAUUUUGUdT | 517 | |
| | | UfAAdTsdT | | | sdT | | |
| AD-58205.1 | A-118571.1 | UfCfCfUfCfUfGGAAAUfUfGG | 435 | A-118572.1 | AAGGCCfAAUUUCCfAGAGGAdTs | 518 | |
| | | CfCfUfUfdTsdT | | | dT | | |
| AD-58211.1 | A-118573.1 | CfAAAAUfAACfUfCfACfUfAU | 436 | A-118574.1 | AUUfAUfAGUGAGUUfAUUUUGdT | 519 | |
| | | fAAUfdTsdT | | | sdT | | |
| AD-58217.1 | A-118575.1 | CfUfCfUfGGAAAUfUfGGCfCf | 437 | A-118576.1 | UGAAGGCCfAAUUUCCfAGAGdTs | 520 | |
| | | UfUfCfAdTsdT | | | dT | | |
| AD-58223.1 | A-118577.1 | GCfAAGAUfAUfUfUfUfUfAUf | 438 | A-118578.1 | UfAUUfAUfAAAAAUfAUCUUGCd | 521 | |
| | | AAUfAdTsdT | | | TsdT | | |
| AD-58229.1 | A-118579.1 | AAUfGUfUfUfUfUfGUfCfAAG | 439 | A-118580.1 | UGUfACUUGACfAAAAACfAUUdT | 522 | |
| | | UfACfAdTsdT | | | sdT | | |
| AD-58234.1 | A-118581.1 | UfUfAAACfAACfAAGUfACfCf | 440 | A-118582.1 | AAAGGUfACUUGUUGUUUfAAdTs | 523 | |
| | | UfUfUfdTsdT | | | dT | | |
| AD-58194.1 | A-118583.1 | UfCfAGAAAGUfCfUfGUfGAAG | 441 | A-118584.1 | UCCUUCfACfAGACUUUCUGAdTs | 524 | |
| | | GAdTsdT | | | dT | | |
| AD-58200.1 | A-118585.1 | ACfUfGAAGCfAUfUfUfGAUfG | 442 | A-118586.1 | UUGCfAUCfAAAUGCUUCfAGUdT | 525 | |
| | | CfAAdTsdT | | | sdT | | |
| AD-58206.1 | A-118587.1 | AGUfUfCfUfGUfGUfUfAAAAU | 443 | A-118588.1 | GACfAUUUUfAACfACfAGAACUd | 526 | |
| | | fGUfCfdTsdT | | | TsdT | | |
| AD-58236.1 | A-118423.2 | cAcuAuAAuuAcuuGAuuudTsdT | 444 | A-118644.1 | AAAUcAAGuAAUuAuAGuGdTsdT | 527 | |
| AD-58242.1 | A-118425.2 | uAAcucAcuAuAAuuAcuudTsdT | 445 | A-118645.1 | AAGuAAUuAuAGuGAGUuAdTsdT | 528 | |
| AD-58248.1 | A-118427.2 | AcAAAAuAAcucAcuAuAAdTsdT | 446 | A-118646.1 | UuAuAGuGAGUuAuUuuGUdTsdT | 529 | |
| AD-58254.1 | A-118429.2 | uccucuGGAAAuuGGccuudTsdT | 447 | A-118647.1 | AAGGCcAAuUUCcAGAGGAdTsdT | 530 | |
| AD-58260.1 | A-118431.2 | cAAAAuAAcucAcuAuAAudTsdT | 448 | A-118648.1 | AUuAuAGuGAGUuAuUuuGdTsdT | 531 | |
| AD-58266.1 | A-118433.2 | cucuGGAAAuuGGccuucAdTsdT | 449 | A-118649.1 | uGAAGGCcAAuUUCcAGAGdTsdT | 532 | |
| AD-58272.1 | A-118435.2 | GcAAGAuAuuuuuAuAAuAdTsdT | 450 | A-118650.1 | uAUuAuAAAAAuAUCuuGCdTsdT | 533 | |
| AD-58277.1 | A-118437.2 | AAuGuuuuuGucAAGuAcAdTsdT | 451 | A-118651.1 | uGuACuuGAcAAAAAcAuUdTsdT | 534 | |
| AD-58237.1 | A-118439.2 | uuAAAcAAcAAGuAccuuudTsdT | 452 | A-118652.1 | AAAGGuACuuGuuGuUuAAdTsdT | 535 | |
| AD-58243.1 | A-118441.2 | ucAGAAAGucuGuGAAGGAdTsdT | 453 | A-118653.1 | UCCuUcAcAGACuUUCuGAdTsdT | 536 | |
| AD-58249.1 | A-118443.2 | AcuGAAGcAuuuGAuGcAAdTsdT | 454 | A-118654.1 | uuGcAUcAAAuGCuUcAGUdTsdT | 537 | |
| AD-58255.1 | A-118445.2 | AGuucuGuGuuAAAAuGucdTsdT | 455 | A-118655.1 | GAcAuUUuAAcAcAGAACUdTsdT | 538 | |
| AD-58279.1 | A-118423.3 | cAcuAuAAuuAcuuGAuuudTsdT | 456 | A-118667.1 | AAAUCAAGuAAuuAuAgugdTsdT | 539 | |
| AD-58239.1 | A-118425.3 | uAAcucAcuAuAAuuAcuudTsdT | 457 | A-118668.1 | AAGuAAuUAuAGuGAGuuadTsdT | 540 | |
| AD-58245.1 | A-118427.3 | AcAAAAuAAcucAcuAuAAdTsdT | 458 | A-118669.1 | UuAuAGuGAGuuAuuuugudTsdT | 541 | |
| AD-58251.1 | A-118429.3 | uccucuGGAAAuuGGccuudTsdT | 459 | A-118670.1 | AAGGCCAAuUuCCAGAggadTsdT | 542 | |

TABLE 7
C5 single dose screen in Hep3B cells
with GalNAC conjugated iRNAs

| | 10 nM | 0.1 nM | 10 nM | 0.1 nM |
|---|---|---|---|---|
| Duplex ID | AVG | AVG | STDEV | STDEV |
| AD-58093.1 | 15.62 | 21.60 | 7.48 | 6.52 |
| AD-58099.1 | 9.07 | 14.70 | 1.18 | 4.65 |
| AD-58105.1 | 36.71 | 60.23 | 5.07 | 19.83 |
| AD-58111.1 | 11.83 | 22.78 | 3.51 | 12.75 |
| AD-58117.1 | 12.43 | 33.46 | 2.00 | 23.56 |
| AD-58123.1 | 8.05 | 15.18 | 2.89 | 7.94 |
| AD-58129.1 | 10.77 | 40.06 | 1.30 | 19.66 |
| AD-58088.1 | 6.55 | 16.40 | 1.24 | 4.58 |
| AD-58094.1 | 19.59 | 40.68 | 7.64 | 12.30 |
| AD-58100.1 | 10.92 | 20.12 | 0.74 | 8.38 |
| AD-58106.1 | 10.97 | 37.23 | 2.49 | 19.95 |
| AD-58112.1 | 13.24 | 29.32 | 2.90 | 14.08 |
| AD-58118.1 | 6.63 | 15.23 | 0.54 | 5.72 |
| AD-58124.1 | 7.17 | 13.00 | 1.44 | 6.48 |
| AD-58130.1 | 10.38 | 17.92 | 2.36 | 6.92 |
| AD-58089.1 | 8.81 | 30.67 | 2.91 | 10.53 |
| AD-58095.1 | 8.72 | 14.66 | 1.04 | 3.37 |
| AD-58101.1 | 8.17 | 19.36 | 1.30 | 5.69 |
| AD-58107.1 | 4.84 | 18.10 | 1.66 | 7.21 |
| AD-58113.1 | 8.78 | 14.62 | 1.77 | 7.89 |
| AD-58119.1 | 8.90 | 15.01 | 0.91 | 7.35 |
| AD-58125.1 | 11.13 | 17.04 | 2.61 | 9.03 |
| AD-58131.1 | 13.50 | 40.14 | 1.08 | 12.07 |
| AD-58090.1 | 7.90 | 21.57 | 2.95 | 6.61 |
| AD-58096.1 | 8.02 | 16.56 | 1.54 | 6.68 |
| AD-58102.1 | 12.40 | 27.93 | 1.83 | 11.78 |
| AD-58108.1 | 12.02 | 15.07 | 2.88 | 5.74 |
| AD-58114.1 | 11.86 | 25.05 | 1.48 | 9.46 |
| AD-58120.1 | 7.65 | 10.57 | 0.58 | 3.56 |
| AD-58126.1 | 8.45 | 15.39 | 2.08 | 7.42 |
| AD-58132.1 | 8.50 | 19.26 | 2.52 | 9.38 |
| AD-58091.1 | 8.68 | 18.05 | 2.95 | 6.62 |
| AD-58097.1 | 9.31 | 23.02 | 0.67 | 10.10 |
| AD-58103.1 | 8.53 | 17.23 | 2.90 | 7.27 |
| AD-1955 | 57.41 | 81.16 | 10.76 | 5.29 |
| Mock | 78.61 | 75.97 | 5.70 | 2.76 |
| Untreated | 100 | 100 | 6.13 | 5.98 |

TABLE 8
C5 single dose transfection screen in primary
mouse hepatocytes with GalNAC conjugated iRNAs

| | 10 nM | 0.1 nM | 10 nM | 0.1 nM |
|---|---|---|---|---|
| Duplex ID | AVG | AVG | STDEV | STDEV |
| AD-58093.1 | 1.53 | 1.65 | 0.17 | 0.25 |
| AD-58099.1 | 1.65 | 1.50 | 0.61 | 0.22 |
| AD-58105.1 | 11.20 | 46.95 | 0.08 | 3.89 |
| AD-58111.1 | 2.49 | 2.13 | 0.26 | 0.20 |
| AD-58117.1 | 3.57 | 31.91 | 0.93 | 0.62 |
| AD-58123.1 | 4.29 | 2.97 | 0.11 | 2.22 |
| AD-58129.1 | 1.19 | 8.53 | 0.23 | 0.72 |
| AD-58088.1 | 0.84 | 1.34 | 0.68 | 0.07 |
| AD-58094.1 | 11.34 | 66.82 | 0.17 | 3.01 |
| AD-58100.1 | 2.78 | 1.51 | 0.43 | 0.33 |
| AD-58106.1 | 6.79 | 52.91 | 4.42 | 6.78 |
| AD-58121.1 | 1.94 | 2.15 | 0.04 | 0.91 |
| AD-58133.1 | 1.74 | 3.25 | 0.19 | 1.64 |
| AD-58116.1 | 1.76 | 2.21 | 1.27 | 0.78 |
| AD-1955 | 87.39 | 91.71 | 5.77 | 4.68 |
| Mock | 79.67 | 89.02 | 1.51 | 3.91 |
| Untreated | 100 | 100 | 6.39 | 13.11 |

TABLE 9
C5 single dose screen in primary Cynomolgus
hepatocytes with GalNAC conjugated iRNAs

| | 500 nM | 5 nM | 500 nM | 5 nM |
|---|---|---|---|---|
| Duplex ID | AVG | AVG | STDEV | STDEV |
| AD-58093.1 | 63.94 | 83.09 | 2.14 | 12.65 |
| AD-58099.1 | 61.34 | 85.85 | 12.32 | 21.95 |
| AD-58105.1 | 91.98 | 97.57 | 6.09 | 11.48 |
| AD-58111.1 | 71.27 | 92.28 | 1.93 | 12.72 |
| AD-58117.1 | 73.42 | 88.82 | 3.24 | 11.08 |
| AD-58123.1 | 75.14 | 73.06 | 7.72 | 9.71 |
| AD-58129.1 | 81.66 | 90.62 | 2.13 | 4.77 |
| AD-58088.1 | 53.63 | 87.03 | 5.93 | 19.86 |
| AD-58094.1 | 89.62 | 93.65 | 0.87 | 14.76 |
| AD-58100.1 | 79.56 | 96.70 | 4.31 | 1.10 |
| AD-58106.1 | 116.24 | 125.99 | 14.28 | 40.65 |
| AD-58112.1 | 97.19 | 107.81 | N/A | 3.13 |
| AD-58118.1 | 67.40 | 97.38 | 5.28 | 22.64 |
| AD-58124.1 | 58.04 | 96.14 | 8.72 | 10.64 |
| AD-58130.1 | 84.19 | 88.65 | 10.50 | 4.34 |
| AD-58089.1 | 83.83 | 83.44 | 1.91 | 12.26 |
| AD-58095.1 | 58.53 | 78.02 | 15.07 | 12.45 |
| AD-58101.1 | 76.68 | 76.73 | 3.95 | 6.35 |
| AD-58107.1 | 57.37 | 86.78 | 14.71 | 2.99 |
| AD-58113.1 | 37.79 | 71.10 | 8.27 | 7.76 |
| AD-58119.1 | 36.77 | 83.16 | 3.42 | 9.66 |
| AD-58125.1 | 72.40 | 96.53 | 4.46 | 4.96 |
| AD-58131.1 | 95.58 | 101.69 | 10.17 | 2.21 |
| AD-58090.1 | 56.37 | 75.00 | 3.21 | 4.97 |
| AD-58096.1 | 44.33 | 57.99 | 11.46 | 25.17 |
| AD-58102.1 | 95.46 | 89.35 | 0.83 | 1.76 |
| AD-58108.1 | 41.54 | 56.41 | 8.41 | 0.14 |
| AD-58114.1 | 88.32 | 101.88 | 20.02 | 30.29 |
| AD-58120.1 | 37.34 | 56.41 | 0.73 | 2.14 |
| AD-58126.1 | 84.97 | 105.90 | 2.39 | 7.96 |
| AD-58132.1 | 81.55 | 85.12 | 12.93 | 8.94 |
| AD-58091.1 | 78.88 | 84.60 | 44.66 | 17.40 |
| AD-58097.1 | 106.06 | 98.16 | 13.74 | 3.14 |
| AD-58103.1 | 57.21 | 89.46 | 6.40 | 5.93 |
| Untreated | 100 | 100 | 8.77 | 10.33 |

TABLE 10
C5 single dose free uptake screen in primary mouse
hepatocytes with GalNAC conjugated iRNAs

| | 500 nM | 5 nM | 500 nM | 5 nM |
|---|---|---|---|---|
| Duplex ID | AVG | AVG | STDEV | STDEV |
| AD-58093.1 | 31.62 | 64.91 | 7.13 | 8.39 |
| AD-58099.1 | 9.46 | 29.63 | 1.29 | 5.66 |
| AD-58105.1 | 84.77 | 96.41 | 5.22 | 1.89 |
| AD-58111.1 | 17.35 | 50.95 | 1.21 | 3.16 |
| AD-58117.1 | 94.95 | 139.52 | 15.43 | 43.39 |
| AD-58123.1 | 13.07 | 44.58 | 2.11 | 3.49 |
| AD-58129.1 | 68.87 | 85.04 | 2.62 | 4.42 |
| AD-58088.1 | 17.61 | 48.22 | 2.22 | 3.40 |
| AD-58094.1 | 95.92 | 104.23 | 4.16 | 6.53 |
| AD-58100.1 | 34.92 | 61.71 | 1.30 | 2.15 |
| AD-58106.1 | 85.26 | 107.53 | 2.30 | 3.38 |
| AD-58121.1 | 12.88 | 43.76 | 1.41 | 1.28 |
| AD-58133.1 | 20.97 | 42.76 | 0.24 | 0.11 |
| AD-58116.1 | 8.35 | 38.04 | 1.35 | 1.40 |
| Untreated | 100.00 | 100.00 | 3.85 | 4.38 |

TABLE 11
IC₅₀ data in primary Cynomolgus hepatocytes
with GalNAC conjugated iRNAs

| Duplex ID | IC₅₀ (nM) | STDEV |
|---|---|---|
| AD-58099.1 | 3.131 | 1.141 |
| AD-58111.1 | 12.750 | 5.280 |
| AD-58123.1 | 0.679 | 7.587 |
| AD-58088.1 | 0.218 | 3.487 |
| AD-58113.1 | 7.296 | 3.540 |
| AD-58119.1 | 33.240 | 14.740 |
| AD-58096.1 | 10.380 | 4.199 |
| AD-58108.1 | 0.953 | 10.080 |
| AD-58120.1 | 36.170 | 88.070 |

TABLE 12
IC₅₀ data in primary mouse hepatocytes
with GalNAC conjugated iRNAs

| Duplex ID | IC₅₀ (nM) | STDEV |
|---|---|---|
| AD-58099 | 3.777 | 0.122 |
| AD-58111 | 0.622 | 2.421 |
| AD-58123 | 0.549 | 1.626 |
| AD-58088 | 9.513 | 2.588 |
| AD-58121 | 2.169 | 1.176 |
| AD-58133 | 3.802 | 1.006 |
| AD-58116 | 2.227 | 0.604 |
| AD-58644.1 | 4.596 | 0.3506 |
| AD-58651.1 | 59.76 | 51.99 |
| AD-58641.1 | 0.82 | 0.2618 |
| AD-58648.1 | 7.031 | 1.256 |
| AD-58642.1 | 0.5414 | 0.7334 |
| AD-58649.1 | 3.32 | 4.922 |
| AD-58647.1 | 1.356 | 0.5215 |
| AD-58654.1 | 2.09 | 0.8338 |
| AD-58645.1 | 2.944 | 0.3315 |
| AD-58652.1 | 5.316 | 2.477 |
| AD-58643.1 | 2.179 | 1.112 |
| AD-58650.1 | 8.223 | 3.76 |
| AD-58646.1 | 2.581 | 0.8186 |
| AD-58653.1 | 2.451 | 1.249 |

TABLE 13
C5 single dose screen in Hep3B cells
with modified and unmodified iRNAs

| | 1 nM | 0.01 nM | 1 nM | 0.01 nM |
|---|---|---|---|---|
| Duplex | AVG | AVG | STDEV | STDEV |
| AD-58143.1 | 12.13 | 100.58 | 3.47 | 3.94 |
| AD-58149.1 | 10.46 | 64.97 | 0.98 | 0.00 |
| AD-58155.1 | 44.88 | 76.24 | 1.56 | 3.74 |
| AD-58161.1 | 8.51 | 102.30 | 1.06 | 0.50 |
| AD-58167.1 | 6.54 | 76.24 | 1.15 | 3.74 |
| AD-58173.1 | 6.85 | 107.44 | 0.85 | 4.74 |
| AD-58179.1 | 10.19 | 78.07 | 0.59 | 1.15 |
| AD-58185.1 | 29.46 | 79.99 | 3.64 | 0.78 |
| AD-58144.1 | 16.82 | 81.95 | 1.09 | 0.40 |
| AD-58150.1 | 11.05 | 76.20 | 2.55 | 0.00 |
| AD-58156.1 | 25.92 | 76.73 | 2.72 | 1.50 |
| AD-58162.1 | 13.25 | 71.89 | 0.43 | 3.87 |
| AD-58168.1 | 9.74 | 45.16 | 0.52 | 1.11 |
| AD-58174.1 | 4.84 | 70.14 | 0.25 | 2.75 |
| AD-58180.1 | 9.41 | 56.77 | 1.91 | 1.95 |
| AD-58186.1 | 9.97 | 68.91 | 1.03 | 0.34 |
| AD-58145.1 | 14.29 | 103.38 | 1.94 | 2.03 |
| AD-58151.1 | 10.16 | 81.17 | 1.71 | 4.77 |
| AD-58157.1 | 4.72 | 63.19 | 1.05 | 0.00 |
| AD-58163.1 | 4.95 | 40.13 | 1.65 | 0.59 |
| AD-58169.1 | 17.02 | 83.10 | 1.88 | 2.04 |
| AD-58175.1 | 8.30 | 62.54 | 0.28 | 0.31 |
| AD-58181.1 | 21.89 | 55.26 | 4.22 | 3.52 |
| AD-58187.1 | 61.96 | 71.12 | 2.61 | 2.79 |
| AD-58146.1 | 14.25 | 95.23 | 2.64 | 6.53 |
| AD-58152.1 | 11.22 | 70.09 | 0.80 | 7.88 |
| AD-58158.1 | 7.96 | 98.86 | 0.76 | 4.36 |
| AD-58164.1 | 11.60 | 43.83 | 2.06 | 3.43 |
| AD-58170.1 | 12.28 | 39.59 | 0.96 | 1.36 |
| AD-58176.1 | 6.89 | 38.77 | 1.04 | 1.33 |
| AD-58182.1 | 18.65 | 55.78 | 0.96 | 0.55 |
| AD-58188.1 | 5.40 | 69.39 | 1.07 | 0.34 |
| AD-58147.1 | 8.22 | 106.66 | 0.77 | 2.61 |
| AD-58153.1 | 68.10 | 104.17 | 4.44 | 18.29 |
| AD-58159.1 | 8.76 | 81.41 | 1.54 | 2.79 |
| AD-58190.1 | 21.94 | 77.26 | 2.23 | 0.76 |
| AD-58196.1 | 15.97 | 72.43 | 1.07 | 5.32 |
| AD-58202.1 | 11.99 | 93.83 | 5.34 | 2.76 |
| AD-58208.1 | 18.63 | 52.07 | 12.88 | 2.55 |
| AD-58214.1 | 6.85 | 94.15 | 0.51 | 2.31 |
| AD-58220.1 | 11.50 | 78.34 | 3.85 | 0.77 |
| AD-58226.1 | 5.77 | 57.75 | 1.71 | 1.13 |
| AD-58231.1 | 7.23 | 75.67 | 1.07 | 0.74 |
| AD-58191.1 | 35.40 | 66.17 | 5.50 | 4.21 |
| AD-58197.1 | 12.05 | 67.49 | 1.70 | 0.33 |
| AD-58203.1 | 15.16 | 66.80 | 1.46 | 1.31 |
| AD-58209.1 | 7.58 | 71.23 | 3.58 | 6.28 |
| AD-58233.1 | 27.01 | 86.02 | 0.86 | 0.42 |
| AD-58193.1 | 15.37 | 99.85 | 1.44 | 0.00 |
| AD-58199.1 | 21.52 | 78.39 | 6.02 | 16.40 |
| AD-58205.1 | 24.13 | 78.88 | 5.46 | 0.77 |
| AD-58211.1 | 16.38 | 32.37 | 2.61 | 0.48 |
| AD-58217.1 | 12.23 | 70.16 | 0.29 | 3.44 |
| AD-58223.1 | 8.51 | 72.85 | 3.01 | 1.79 |
| AD-58229.1 | 5.50 | 75.93 | 1.96 | 0.37 |
| AD-58234.1 | 46.86 | 101.94 | 15.59 | 0.00 |
| AD-58194.1 | 14.49 | 107.05 | 2.47 | 4.20 |
| AD-58200.1 | 16.21 | 61.04 | 0.96 | 1.20 |
| AD-58206.1 | 13.25 | 37.73 | 2.82 | 2.03 |
| AD-58236.1 | 8.29 | 119.17 | 1.16 | 2.92 |
| AD-58242.1 | 12.05 | 102.69 | 0.44 | 4.03 |
| AD-58248.1 | 62.78 | 83.41 | 15.22 | 3.27 |
| AD-58254.1 | 11.18 | 100.54 | 1.59 | 0.00 |
| AD-58260.1 | 8.42 | 71.84 | 1.10 | 0.35 |
| AD-58266.1 | 14.05 | 92.21 | 1.91 | 2.26 |
| AD-58272.1 | 22.63 | 81.11 | 1.62 | 1.59 |
| AD-58277.1 | 70.51 | 75.67 | 4.80 | 0.74 |
| AD-58237.1 | 28.10 | 98.56 | 1.96 | 5.79 |
| AD-58243.1 | 14.16 | 86.05 | 1.11 | 2.95 |
| AD-58249.1 | 77.08 | 96.45 | 15.14 | 0.95 |
| AD-58255.1 | 12.27 | 47.89 | 2.58 | 0.00 |
| AD-58279.1 | 25.78 | 94.13 | 5.52 | 0.46 |
| AD-58239.1 | 22.98 | 83.45 | 0.28 | 4.91 |
| AD-58245.1 | 89.60 | 90.93 | 15.24 | 0.45 |
| AD-58251.1 | 28.39 | 86.32 | 7.29 | 0.00 |
| AD-58257.1 | 48.97 | 64.53 | 9.10 | 1.90 |
| AD-58263.1 | 9.14 | 83.39 | 1.27 | 1.63 |
| AD-58269.1 | 83.84 | 75.94 | 15.90 | 1.12 |
| AD-58275.1 | 10.29 | 86.32 | 0.73 | 0.85 |
| AD-58280.1 | 72.77 | 110.04 | 7.44 | 3.24 |
| AD-58240.1 | 65.42 | 75.69 | 3.82 | 2.23 |
| AD-58246.1 | 59.19 | 65.88 | 28.95 | 0.65 |
| AD-58252.1 | 15.35 | 97.26 | 1.14 | 7.62 |
| Mock | 76.53 | 66.57 | 14.26 | 4.72 |
| AD-1955 | 72.30 | 82.72 | 19.54 | 49.99 |
| Untreated | 100.00 | 100.00 | 21.68 | 26.78 |

TABLE 14
C5 single dose screen in primary mouse hepatocytes
with modified and unmodified iRNAs

| | 1 nM | 0.1 nM | 1 nM | 0.1 nM |
|---|---|---|---|---|
| Duplex ID | AVG | AVG | STDEV | STDEV |
| AD-58143.1 | 4.51 | 81.77 | 3.13 | 8.75 |
| AD-58149.1 | 4.65 | 73.16 | 3.14 | 20.17 |
| AD-58155.1 | 65.56 | 79.74 | 4.66 | 9.36 |
| AD-58161.1 | 16.82 | 81.11 | 6.22 | 7.43 |
| AD-58167.1 | 4.72 | 77.12 | 1.17 | 14.25 |
| AD-58173.1 | 5.57 | 76.00 | 3.14 | 13.52 |
| AD-58179.1 | 14.55 | 77.88 | 1.44 | 18.40 |
| AD-58185.1 | 15.69 | 72.59 | 8.67 | 7.81 |
| AD-58144.1 | 8.70 | 91.49 | 0.90 | 7.08 |
| AD-58150.1 | 12.51 | 84.01 | 1.64 | 8.20 |
| AD-58156.1 | 18.23 | 97.32 | 1.47 | 19.50 |
| AD-58162.1 | 7.72 | 78.89 | 5.19 | 13.80 |
| AD-58190.1 | 11.86 | 92.80 | 2.82 | 4.41 |
| AD-58196.1 | 7.27 | 82.71 | 1.39 | 31.81 |
| AD-58202.1 | 10.67 | 87.11 | 1.04 | 35.79 |
| AD-58208.1 | 32.21 | 74.39 | 8.60 | 27.45 |
| AD-58214.1 | 4.24 | 67.63 | 0.45 | 17.85 |
| AD-58220.1 | 13.64 | 96.14 | 4.56 | 14.36 |
| AD-58226.1 | 3.83 | 63.44 | 1.30 | 11.94 |
| AD-58231.1 | 5.95 | 82.24 | 2.80 | 17.36 |
| AD-58191.1 | 14.50 | 99.50 | 5.48 | 5.53 |
| AD-58197.1 | 16.12 | 93.09 | 0.81 | 3.21 |
| AD-58203.1 | 12.52 | 104.63 | 5.98 | 6.02 |
| AD-58209.1 | 8.79 | 59.35 | 3.05 | 13.07 |
| AD-58233.1 | 9.50 | 64.26 | 5.69 | 8.70 |
| AD-58193.1 | 8.88 | 89.60 | 3.36 | 3.08 |
| AD-58199.1 | 13.56 | 87.14 | 2.18 | 6.44 |
| AD-58205.1 | 46.84 | 89.13 | 4.48 | 17.16 |
| AD-58211.1 | 13.10 | 111.62 | 1.10 | 21.54 |
| AD-58217.1 | 29.79 | 117.49 | 11.85 | 20.41 |
| AD-58223.1 | 20.53 | 105.44 | 1.94 | 2.98 |
| AD-58229.1 | 13.76 | 98.15 | 1.05 | 9.03 |
| AD-58234.1 | 12.33 | 71.34 | 0.72 | 4.17 |
| AD-58194.1 | 14.02 | 90.60 | 1.39 | 15.64 |
| AD-58200.1 | 5.25 | 90.95 | 1.37 | 31.70 |
| AD-58206.1 | 8.19 | 109.47 | 3.99 | 21.75 |
| AD-58236.1 | 2.07 | 70.19 | 0.80 | 20.59 |
| AD-58242.1 | 4.76 | 53.26 | 1.59 | 11.56 |
| AD-58248.1 | 62.42 | 78.23 | 5.47 | 25.85 |
| AD-58254.1 | 16.47 | 70.22 | 2.92 | 21.74 |
| AD-58260.1 | 2.84 | 75.65 | 0.38 | 11.59 |
| AD-58266.1 | 40.70 | 89.88 | 16.05 | 11.57 |
| AD-58272.1 | 21.42 | 59.44 | 13.29 | 10.98 |
| AD-58277.1 | 71.72 | 121.44 | 16.35 | 21.16 |
| AD-58237.1 | 11.85 | 112.68 | 9.22 | 12.88 |
| AD-58243.1 | 10.46 | 90.64 | 3.42 | 4.33 |
| AD-58249.1 | 71.47 | 113.30 | 4.30 | 3.84 |
| AD-58255.1 | 6.86 | 78.55 | 2.22 | 28.37 |
| AD-58279.1 | 7.15 | 74.96 | 2.84 | 4.72 |
| AD-58239.1 | 13.64 | 106.45 | 1.87 | 8.25 |
| AD-58245.1 | 68.67 | 112.08 | 21.89 | 7.73 |
| AD-58251.1 | 47.01 | 133.20 | 4.69 | 7.14 |
| AD-58257.1 | 30.68 | 87.51 | 2.87 | 32.84 |
| AD-58263.1 | 7.22 | 83.23 | 2.55 | 37.50 |
| AD-58269.1 | 78.90 | 106.06 | 5.07 | 3.04 |
| AD-58275.1 | 8.92 | 95.77 | 1.91 | 7.14 |
| AD-58280.1 | 16.67 | 78.47 | 4.15 | 6.06 |
| AD-58240.1 | 71.03 | 138.54 | 5.32 | 10.87 |
| AD-58246.1 | 71.87 | 89.02 | 4.95 | 8.63 |
| AD-58252.1 | 4.04 | 56.10 | 1.23 | 12.02 |
| Mock | 66.84 | 82.81 | 2.75 | 17.19 |
| AD-1955 | 87.44 | 102.07 | 3.64 | 4.08 |
| Untreated | 100.00 | 100.00 | 15.25 | 18.37 |

TABLE 15
IC₅₀ data in Hep3B cells with modified and unmodified iRNAs

| Duplex ID | IC₅₀ (pM) | STDEV |
|---|---|---|
| AD-58143.1 | 36.35 | 12.26 |
| AD-58149.1 | 5.735 | 6.196 |
| AD-58161.1 | 78.12 | 26.64 |
| AD-58167.1 | 31.03 | 18.14 |
| AD-58173.1 | 29.12 | 16.53 |
| AD-58236.1 | 52.73 | 32.02 |
| AD-58242.1 | 8.859 | 4.321 |
| AD-58260.1 | 7.706 | 5.094 |
| AD-58263.1 | 96.64 | 47.61 |

TABLE 16
IC₅₀ data in primary mouse hepatocytes
with modified and unmodified iRNAs

| Duplex ID | IC₅₀ (pM) | STDEV |
|---|---|---|
| AD-58260.1 | 1.015 | 0.9676 |
| AD-58149.1 | 1.309 | 1.749 |
| AD-58167.1 | 1.991 | 2.477 |
| AD-58242.1 | 0.5866 | 1.8 |
| AD-58236.1 | 0.4517 | 0.06392 |
| AD-58143.1 | 0.8876 | 0.1613 |
| AD-58279.1 | 3.116 | 0.7368 |
| AD-58252.1 | 7.153 | 1.021 |
| AD-58173.1 | 7.144 | 19.88 |
| AD-58263.1 | 3.224 | 5.478 |

### Example 3. In Vivo Screening

[0675] A subset of seven GalNAC conjugated iRNAs was selected for further in vivo evaluation.

[0676] C57BL/6 mice (N=3 per group) were injected subcutaneously with 10 mg/kg of GalNAc conjugated duplexes or an equal volume of 1×Dulbecco's Phosphate-Buffered Saline (DPBS) (Life Technologies, Cat #14040133). Forty-eight hours later, mice were euthanized and the livers were dissected and flash frozen in liquid nitrogen. Livers were ground in a 2000 Geno/Grinder (SPEX SamplePrep, Metuchen, NJ). Approximately 10 mg of liver powder per sample was used for RNA isolation. Samples were first homogenized in a TissueLyserII (Qiagen Inc, Valencia, CA) and then RNA was extracted using a RNeasy 96 Universal Tissue Kit (Qiagen Inc, Cat #74881) following manufacturer's protocol using vacuum/spin technology. RNA concentration was measured by a NanoDrop 8000 (Thermo Scientific, Wilmington, DE) and was adjusted to 100 ng/μl. cDNA and RT-PCR were performed as described above.

[0677] The results of the single dose screen are depicted in FIG. 2. Table 17 shows the results of an in vivo single dose screen with the indicated GalNAC conjugated modified iRNAs. Data are expressed as percent of mRNA remaining relative to DPBS treated mice. The “Experiments” column lists the number of experiments from which the average was calculated. The standard deviation is calculated from all mice in a group across all experiments analyzed.

TABLE 17
In vivo C5 single dose screen

| Duplex ID | Experiments | AVG | STDEV |
|---|---|---|---|
| AD-58088.2 | 2 | 82.66 | 13.54 |
| AD-58644.1 | 1 | 37.79 | 9.63 |
| AD-58651.1 | 1 | 75.33 | 5.21 |
| AD-58099.2 | 2 | 71.94 | 15.45 |
| AD-58641.1 | 1 | 20.09 | 4.09 |
| AD-58648.1 | 1 | 48.43 | 9.07 |
| AD-58111.2 | 3 | 67.17 | 13.60 |
| AD-58642.1 | 2 | 21.78 | 5.32 |
| AD-58649.1 | 1 | 45.30 | 14.02 |
| AD-58116.2 | 2 | 70.16 | 10.32 |
| AD-58647.1 | 1 | 26.77 | 4.14 |
| AD-58654.1 | 1 | 50.06 | 27.85 |
| AD-58121.2 | 2 | 52.56 | 13.00 |
| AD-58645.1 | 1 | 24.60 | 1.29 |
| AD-58652.1 | 1 | 52.67 | 3.87 |
| AD-58123.2 | 2 | 65.70 | 9.60 |
| AD-58643.1 | 1 | 23.21 | 2.41 |
| AD-58650.1 | 1 | 46.75 | 14.10 |
| AD-58133.2 | 3 | 51.98 | 13.45 |
| AD-58646.1 | 2 | 28.67 | 5.34 |
| AD-58653.1 | 1 | 43.02 | 10.61 |
| PBS | 3 | 100.00 | 9.03 |

[0678] Two of the most efficacious GalNAC conjugated iRNAs were further modified to include additional phosphorothioate linkages (Table 18) and the efficacy of these duplexes was determined in vivo as described above. The results of the single dose screen are depicted in FIG. 3 and demonstrate that the iRNA agents with additional phosphorothiate linkages are more efficacious than those iRNA agents without or with fewer phosphorothioate linkages.

TABLE 18
Phosphorothioate Modifed GalNAC Conjugated C5 iRNAs

| | | | SEQ | | | SEQ | |
|---|---|---|---|---|---|---|---|
| | Sense | | ID | | | ID | |
| Duple ID | strand | Sense sequence | NO: | Antisense | Antisense sequence | NO: | Cross Reactivity |
| AD-58642.1 | A-119324.1 | GfsasCfaAfaAfuAfAfC | 551 | A-119325.1 | asUfsuAfuAfgUfgAfg | 555 | HumRheMusRat |
| | | fuCfaCfuAfuAfaUfL96 | | | uuAfuUfuUfgUfcsasa | | |
| AD-58111.2 | A-118316.1 | GfaCfaAfaAfuAfAfCfu | 552 | A-118317.1 | aUfuAfuAfgUfgAfguu | 556 | HumRheMusRat |
| | | CfaCfuAfuAfaUfL96 | | | AfuUfuUfgUfcsAfsa | | |
| AD-58646.1 | A-119332.1 | CfsasGfaUfcAfaAfCfA | 553 | A-119333.1 | asCfsuGfaAfaUfuGfu | 557 | MusRat |
| | | fcAfaUfuUfcAfgUfL96 | | | guUfuGfaUfcUfgscsa | | |
| AD-58133.2 | A-118386.1 | CfaGfaUfcAfaAfCfAfc | 554 | A-118387.1 | aCfuGfaAfaUfuGfugu | 558 | MusRat |
| | | AfaUfuUfcAfgUfL96 | | | UfuGfaUfcUfgsCfsa | | |

[0679] Given the impact of the additional phosphorothioate linkages on the silencing ability of the iRNA agents described above, the efficacy of additional GalNAC conjugated iRNA duplexes including phosphoriothioate linkages (Table 19) was determined in vivo as described above. The results of this single dose screen are depicted in FIG. 4.

[0680] The duration of silencing of AD-58642 in vivo was determined by administering a single 2.5 mg/kg, 10 mg/kg, or 25 mg/kg dose to rats and determining the amount of C5 protein (FIG. 5B) present on day 7 and the activity of C5 protein (FIG. 5A) present on days 4 and 7. As demonstrated in FIG. 5, there is a 50% reduction in the activity of C5 protein by Day 4 at a 25 mg/kg dose and at Day 7, a greater than 70% reduction in the activity of C5 protein.

[0681] The amount of C5 protein was determined by Western blot analysis of whole serum. The activity of C5 protein was determined by a hemolysis assay. Briefly, a fixed dilution of human C5 depleted human serum was mixed with mouse serum and incubated with antibody-coated sheep red blood cells for 1 hour. The hemoglobin absorbance was measured and the % hemolysis as compared to a reference curve (prepared using a dilution series of mouse serum) was calculated.

[0682] The efficacy of AD-58642 in vivo was also assayed in mice following a single subcutaneous injection of 1.25 mg/kg, 2.5 mg/kg, 5 mg/kg, 10 mg/kg, and 25 mg/kg of AD-58642. At day 5 C5 mRNA was assayed in liver samples using qPCR, C5 activity was assayed for hemolysis, and the amount of C5 protein was determined by Western blot analysis of whole serum.

[0683] As depicted in FIGS. 6A and 6B, although there is only a minor improvement (i.e., about 5%) in efficacy of AD-58642 to inhibit C5 mRNA at a dose of 25 mg/kg as compared to a 10 mg/kg dose, there is an average of 85% silencing with a 25 mg/kg dose. In addition, there is a dose response effect with an IC₅₀ of about 2.5 mg/kg.

[0684] FIGS. 7A and 7B and 8 demonstrate that AD-58642 is efficacious for decreasing the amount of C5 protein (FIG. 8) and C5 protein activity (FIGS. 7A and 7B).

[0685] The duration of silencing of AD-58641 in vivo was also determined by subcutaneously administering a single 0.625 mg/kg, 1.25 mg/kg, 2.5 mg/kg, 5.0 mg/kg, or 10 mg/kg dose of AD-58641 to C57B1/6 (n=3) mice and determining the amount of C5 protein present in these animals on days 5 and 9 by ELISA. Briefly, serum was collected on day 0, pre-bleed, day 5, and day 9 and the levels of C5 proteins were quantified by ELISA. C5 protein levels were normalized to the day 0 pre-bleed level. As depicted in FIG. 9, the results demonstrate that there is a dose dependent potent and durable knock-down of C5 serum protein. (The single dose ED₅₀ was 0.6 mg/kg).

[0686] Compound AD-58641 was also tested for efficacy in C57B1/6 mice using a multi-dosing administration protocol. Mice were subcutaneously administered compound AD-58641 at a 0.625 mg/kg, 1.25 mg/kg, or 2.5 mg/kg dose at days 0, 1, 2, and 3. Serum was collected at days 0 and 8 as illustrated in FIG. 10 and analyzed for C5 protein levels by ELISA. C5 levels were normalized to the day 0 pre-bleed level. FIG. 10 shows that multi-dosing of AD-58641 achieves silencing of C5 protein at all of the does tested, with a greater than 90% silencing of C5 protein at a dose of 2.5 mg/kg.

[0687] Compound AD-58641 was further tested for efficacy and to evaluate the cumulative effect of the compound in rats using a repeat administration protocol. Wild-type Sprague Dawley rats were subcutaneously injected with compound AD-58641 at a 2.5 mg/kg/dose or 5.0 mg/kg/dose twice a week for 3 weeks (q2w×3). Serum was collected on days 0, 4, 7, 11, 14, 18, 25, and 32. Serum hemolytic activity was quantified using a hemolysis assay in which a 1:150 dilution of rat serum was incubated with sensitized sheep rat blood cells in GVB++ buffer for 1 hour and hemoglobin release was quantified by measuring absorbance at 415 nm (see FIG. 11A). The amount of C5 protein present in the samples was also determined by ELISA (FIG. 11B). The results demonstrate a dose dependent potent and durable decrease in hemolytic activity, achieving about 90% hemolytic activity inhibition.

TABLE 19
Additional Phosphorothioate Modifed GalNAC Conjugated C5 iRNAs

| | | | SEQ | | | SEQ | | | |
|---|---|---|---|---|---|---|---|---|---|
| | Sense | | ID | | | ID | Start | Cross | PS |
| Duplex ID | strand | Sense sequence | NO: | Antisense | Antisense sequence | NO: | position | Reactivity | # |
| AD-58088.2 | A-118324.1 | AfuUfuAfaAfcAfA | 559 | A-118325.1 | aAfaGfgUfaCfuUfguu | 580 | 984 | HumRheMus | 2 |
| | | fCfaAfgUfaCfcUf | | | GfuUfuAfaAfusCfsu | | | | |
| | | uUfL96 | | | | | | | |
| AD-58644.1 | A-119328.1 | AfsusUfuAfaAfcA | 560 | A-119329.1 | asAfsaGfgUfaCfuUfg | 581 | 984 | HumRheMus | 6 |
| | | fAfCfaAfgUfaCfc | | | uuGfuUfuAfaAfuscsu | | | | |
| | | UfuUfL96 | | | | | | | |
| AD-58651.1 | A-119328.2 | AfsusUfuAfaAfcA | 561 | A-119339.1 | asAfsaGfsgUfsaCfsu | 582 | 984 | HumRheMus | 14 |
| | | fAfCfaAfgUfaCfc | | | UfsguuGfsuUfsuAfsa | | | | |
| | | UfuUfL96 | | | Afsuscsu | | | | |
| AD-58099.2 | A-118312.1 | UfgAfcAfaAfaUfA | 562 | A-118313.1 | uUfaUfaGfuGfaGfuua | 583 | 1513 | HumRheMusRat | 2 |
| | | fAfcUfcAfcUfaUf | | | UfuUfuGfuCfasAfsu | | | | |
| | | aAfL96 | | | | | | | |
| AD-58641.1 | A-119322.1 | UfsgsAfcAfaAfaU | 563 | A-119323.1 | usUfsaUfaGfuGfaGfu | 584 | 1513 | HumRheMusRat | 6 |
| | | fAfAfcUfcAfcUfa | | | uaUfuUfuGfuCfasasu | | | | |
| | | UfaAfL96 | | | | | | | |
| AD-58648.1 | A-119322.2 | UfsgsAfcAfaAfaU | 564 | A-119336.1 | usUfsaUfsaGfsuGfsa | 585 | 1513 | HumRheMusRat | 14 |
| | | fAfAfcUfcAfcUfa | | | GfsuuaUfsuUfsuGfsu | | | | |
| | | UfaAfL96 | | | Cfsasasu | | | | |
| AD-58111.2 | A-118316.1 | GfaCfaAfqaAfuAf | 565 | A-118317.1 | aUfuAfuAfgUfgAfguu | 586 | 1514 | HumRheMusRat | 2 |
| | | AfCfuCfaCfuAfuA | | | AfuUfuUfgUfcsAfsa | | | | |
| | | faUfL96 | | | | | | | |
| AD-58642.1 | A-119324.1 | GfsasCfaAfaAfuA | 566 | A-119325.1 | asUfsuAfuAfgUfgAfg | 587 | 1514 | HumRheMusRat | 6 |
| | | fAfCfuCfaCfuAfu | | | uuAfuUfuUfgUfcsasa | | | | |
| | | AfaUfL96 | | | | | | | |
| AD-58649.1 | A-119324.2 | GfsasCfaAfaAfuA | 567 | A-119337.1 | asUfsuAfsuAfsgUfsg | 588 | 1514 | HumRheMusRat | 14 |
| | | fAfCfuCfaCfuAfu | | | AfsguuAfsuUfsuUfsg | | | | |
| | | AfaUfL96 | | | Ufscsasa | | | | |
| AD-58116.2 | A-118396.1 | GfuUfcCfgGfaUfA | 568 | A-118397.1 | aAfaAfgUfuCfaAfaua | 589 | 4502 | MusRat | 2 |
| | | fUfuUfgAfaCfuUf | | | UfcCfgGfaAfcsCfsg | | | | |
| | | uUfL96 | | | | | | | |
| AD-58647.1 | A-119334.1 | GfsusUfcCfgGfaU | 569 | A-119335.1 | asAfsaAfgUfuCfaAfa | 590 | 4502 | MusRat | 6 |
| | | fAfUfuUfgAfaCfu | | | uaUfcCfgGfaAfcscsg | | | | |
| | | UfuUfL96 | | | | | | | |
| AD-58654.1 | A-119334.2 | GfsusUfcCfgGfaU | 570 | A-119342.1 | asAfsaAfsgUfsuCfsa | 591 | 4502 | MusRat | 14 |
| | | fAfUfuUfgAfaCfu | | | AfsauaUfscCfsgGfsa | | | | |
| | | UfuUfL96 | | | Afscscsg | | | | |
| AD-58121.2 | A-118382.1 | UfgCfaGfaUfcAfA | 571 | A-118383.1 | uGfaAfaUfuGfuGfuuG | 592 | 4945 | MusRat | 2 |
| | | fAfcAfcAfaUfuUf | | | faUfcUfgCfasGfsa | | | | |
| | | cAfL96 | | | | | | | |
| AD-58645.1 | A-119330.1 | UfsgsCfaGfaUfcA | 572 | A-119331.1 | usGfsaAfaUfuGfuGfu | 593 | 4945 | MusRat | 6 |
| | | fAfAfcAfcAfaUfu | | | uuGfaUfcUfgCfasgsa | | | | |
| | | UfcAfL96 | | | | | | | |
| AD-58652.1 | A-119330.2 | UfsgsCfaGfaUfcA | 573 | A-119340.1 | usGfsaAfsaUfsuGfsu | 594 | 4945 | MusRat | 14 |
| | | fAfAfcAfcAfaUfu | | | GfsuuuGfsaUfscUfsg | | | | |
| | | UfcAfL96 | | | Cfsasgsa | | | | |
| AD-58123.2 | A-118320.1 | AfaGfcAfqaGfaUf | 574 | A-118321.1 | uAfuUfaUfaAfaAfaua | 595 | 786 | HumRheMus | 2 |
| | | AfUfuUfuUfaUfaA | | | UfcUfuGfcUfusUfsu | | | | |
| | | fuAfL96 | | | | | | | |
| AD-58643.1 | A-119326.1 | AfsasGfcAfaGfaU | 575 | A-119327.1 | usAfsuUfaUfaAfaAfa | 596 | 786 | HumRheMus | 6 |
| | | fAfUfuUfuUfaUfa | | | uaUfcUfuGfcUfususu | | | | |
| | | AfuAfL96 | | | | | | | |
| AD-58650.1 | A-119326.2 | AfsasGfcAfaGfaU | 576 | A-119338.1 | usAfsuUfsaUfsaAfsa | 597 | 786 | HumRheMus | 14 |
| | | fAfUfuUfuUfaUfa | | | AfsauaUfscUfsuGfsc | | | | |
| | | AfuAfL96 | | | Ufsususu | | | | |
| AD-58133.2 | A-118386.1 | CfaGfaUfcAfaAfC | 577 | A-118387.1 | aCfuGfaAfaUfuGfugu | 598 | 4947 | MusRat | 2 |
| | | fAfcAfaUfuUfcAf | | | UfuGfaUfcUgfsCfsa | | | | |
| | | gUfL96 | | | | | | | |
| AD-58646.1 | A-119332.1 | CfsasGfaUfcAfaA | 578 | A-119333.1 | asCfsuGfaAfaUfuGfu | 599 | 4947 | MusRat | 6 |
| | | fCfAfcAfaUfuUfc | | | guUfuGfaUfcUfgscsa | | | | |
| | | AfgUfL96 | | | | | | | |
| AD-58653.1 | A-119332.2 | CfsasGfaUfcAfaA | 579 | A-119341.1 | asCfsuGfsaAfsaUfsu | 600 | 4947 | MusRat | 14 |
| | | FcFaFcAfaUfuUfc | | | GfsuguUfsuGfsaUfsc | | | | |
| | | AfgUfL96 | | | Ufsgscsa | | | | |

### Example 4: Design, Synthesis, and In Vitro Screening of Additional siRNAs

siRNA Design

[0688] C5 duplexes, 19 nucleotides long for both the sense and antisense strand, were designed using the human C5 mRNA sequence set forth in GenBank Accession No. NM_001735.2. Five-hundred and sixty-nine duplexes were initially identified that did not contain repeats longer than 7 nucleotides, spanning substantially the entire 5480 nucleotide transcript. All 569 duplexes are then scored for predicted efficacy according to a linear model that evaluates the nucleotide pair at each duplex position, and the dose and cell line to be used for screening. The duplexes are also matched against all transcripts in the human RefSeq collection using a custom brute force algorithm, and scored for lowest numbers of mismatches (per strand) to transcripts other than C5. Duplexes to be synthesized and screened are then selected from the 569, according to the following scheme: Beginning at the 5′ end of the transcript, a duplex is selected within a “window” of every 10±2 nucleotides that
[0689] 1) had the highest predicted efficacy,
[0690] 2) had at least one mismatch in both strands to all transcripts other than SERPINC1,
[0691] 3) had not already been synthesized and screened as part of other duplex sets.

[0692] If no duplex is identified within a given window that satisfied all criteria, that window was skipped.

[0693] A detailed list of the 569 C5 sense and antisense strand sequences is shown in Table 20.

[0694] The in vitro efficacy of duplexes comprising the sense and antisense sequences listed in Table 20 is determined using the following methods.

### Cell Culture and Transfections

[0695] HepG2 cells (ATCC, Manassas, VA) are grown to near confluence at 37° C. in an atmosphere of 5% CO₂ in Eagle's Minimum Essential Medium (ATCC) supplemented with 10% FBS, streptomycin, and glutamine (ATCC) before being released from the plate by trypsinization. Transfection is carried out by adding 14.8 μl of Opti-MEM plus 0.2 μl of Lipofectamine RNAiMax per well (Invitrogen, Carlsbad CA. cat #13778-150) to 5 μl of each of the 164 siRNA duplexes to an individual well in a 96-well plate. The mixture is then incubated at room temperature for 15 minutes. 80 μl of complete growth media without antibiotic containing ˜2.5×104 HepG2 cells is then added to the siRNA mixture. Cells are incubated for 24 hours prior to RNA purification. Experiments are performed at 20 nM and included naïve cells and cells transfected with AD-1955, a luciferase targeting siRNA as negative controls.

Total RNA Isolation Using DYNABEADS mRNA Isolation Kit (Invitrogen, Part #: 610-12)

[0696] Cells are harvested and lysed in 150 μl of Lysis/Binding Buffer then mixed for 5 minute at 700 rpm on a platform shaker (the mixing speed was the same throughout the process). Ten microliters of magnetic beads and 80 μl Lysis/Binding Buffer mixture are added to a round bottom plate and mixed for 1 minute. Magnetic beads are captured using magnetic stand and the supernatant is removed without disturbing the beads. After removing supernatant, the lysed cells are added to the remaining beads and mixed for 5 minutes. After removing supernatant, magnetic beads are washed 2 times with 150 μl Wash Buffer A and mixed for 1 minute. Beads are captured again and supernatant removed. Beads are then washed with 150 μl Wash Buffer B, captured and supernatant is removed. Beads are next washed with 150 μl Elution Buffer, captured and supernatant removed. Beads are allowed to dry for 2 minutes. After drying, 50 μl of Elution Buffer is added and mixed for 5 minutes at 70° C. Beads are captured on magnet for 5 minutes. Forty μl of supernatant, containing the isolated RNA is removed and added to another 96 well plate.

cDNA Synthesis Using ABI High Capacity cDNA Reverse Transcription Kit (Applied Biosystems, Foster City, CA, Cat #4368813)

[0697] A master mix of 2 μl 10× Buffer, 0.8 μl 25× dNTPs, 2 μl Random primers, 1 μl Reverse Transcriptase, 1 μl RNase inhibitor and 3.2 μl of H2O per reaction is added into 10 μl total RNA. cDNA is generated using a Bio-Rad C-1000 or S-1000 thermal cycler (Hercules, CA) through the following steps: 25° C. 10 min, 37° C. 120 min, 85° C. 5 see, 4° C. hold.

### Real Time PCR

[0698] Two μl of cDNA is added to a master mix containing 0.5 μl human GAPDH TaqMan Probe (Applied Biosystems Cat #4326317E), 0.5 μl human SERPINC1 TaqMan probe (Applied Biosystems cat #Hs00892758_m1) and 5 μl Lightcycler 480 probe master mix (Roche Cat #04887301001) per well in a 384-well plate (Roche cat #04887301001). Real time PCR is performed in an LC480 Real Time PCR machine (Roche).

[0699] To calculate relative fold change, real time data is analyzed using the ΔΔCt method and normalized to assays performed with cells transfected with 20 nM AD-1955.

TABLE 20
Additional C5 unmodified sense and antisense strand sequences

| | Position in | | SEQ | | SEQ |
|---|---|---|---|---|---|
| Oligo Name | NM_001735.2 | Sense Sequence | ID NO: | Antisense Sequence | ID NO: |
| NM_001735.2_3-21_s | 3-21 | UAUCCGUGGUUUCCUGCUA | 601 | UAGCAGGAAACCACGGAUA | 1170 |
| NM_001735.2_10-28_s | 10-28 | GGUUUCCUGCUACCUCCAA | 602 | UUGGAGGUAGCAGGAAACC | 1171 |
| NM_001735.2_22-40_s | 22-40 | CCUCCAACCAUGGGCCUUU | 603 | AAAGGCCCAUGGUUGGAGG | 1172 |
| NM_001735.2_33-51_s | 33-51 | GGGCCUUUUGGGAAUACUU | 604 | AAGUAUUCCCAAAAGGCCC | 1173 |
| NM_001735.2_43-61_s | 43-61 | GGAAUACUUUGUUUUUUAA | 605 | UUAAAAAACAAAGUAUUCC | 1174 |
| NM_001735.2_49-67_s | 49-67 | CUUUGUUUUUUAAUCUUCC | 606 | GGAAGAUUAAAAAACAAAG | 1175 |
| NM_001735.2_63-81_s | 63-81 | CUUCCUGGGGAAAACCUGG | 607 | CCAGGUUUUCCCCAGGAAG | 1176 |
| NM_001735.2_71-89_s | 71-89 | GGAAAACCUGGGGACAGGA | 608 | UCCUGUCCCCAGGUUUUCC | 1177 |
| NM_001735.2_81-99_s | 81-99 | GGGACAGGAGCAAACAUAU | 609 | AUAUGUUUGCUCCUGUCCC | 1178 |
| NM_001735.2_91-109_s | 91-109 | CAAACAUAUGUCAUUUCAG | 610 | CUGAAAUGACAUAUGUUUG | 1179 |
| NM_001735.2_102-120_s | 102-120 | CAUUUCAGCACCAAAAAUA | 611 | UAUUUUUGGUGCUGAAAUG | 1180 |
| NM_001735.2_109-127_s | 109-127 | GCACCAAAAAUAUUCCGUG | 612 | CACGGAAUAUUUUUGGUGC | 1181 |
| NM_001735.2_123-141_s | 123-141 | CCGUGUUGGAGCAUCUGAA | 613 | UUCAGAUGCUCCAACACGG | 1182 |
| NM_001735.2_130-148_s | 130-148 | GGAGCAUCUGAAAAUAUUG | 614 | CAAUAUUUUCAGAUGCUCC | 1183 |
| NM_001735.2_139-157_s | 139157 | GAAAAUAUUGUGAUUCAAG | 615 | CUUGAAUCACAAUAUUUUC | 1184 |
| NM_001735.2_150-168_s | 150-168 | GAUUCAAGUUUAUGGAUAC | 616 | GUAUCCAUAAACUUGAAUC | 1185 |
| NM_001735.2_163-181_s | 163-181 | GGAUACACUGAAGCAUUUG | 617 | CAAAUGCUUCAGUGUAUCC | 1186 |
| NM_001735.2_172-190_s | 172-190 | GAAGCAUUUGAUGCAACAA | 618 | UUGUUGCAUCAAAUGCUUC | 1187 |
| NM_001735.2_183-201_s | 183-201 | UGCAACAAUCUCUAUUAAA | 619 | UUUAAUAGAGAUUGUUGCA | 1188 |
| NM_001735.2_189-207_s | 189-207 | AAUCUCUAUUAAAAGUUAU | 620 | AUAACUUUUAAUAGAGAUU | 1189 |
| NM_001735.2 201-219_s | 201-219 | AAGUUAUCCUGAUAAAAAA | 621 | UUUUUUAUCAGGAUAACUU | 1190 |
| NM_001735.2_209-227_s | 209-227 | CUGAUAAAAAAUUUAGUUA | 622 | UAACUAAAUUUUUUAUCAG | 1191 |
| NM_001735.2_221-239_s | 221-239 | UUAGUUACUCCUCAGGCCA | 623 | UGGCCUGAGGAGUAACUAA | 1192 |
| NM_001735.2_230-248_s | 230-248 | CCUCAGGCCAUGUUCAUUU | 624 | AAAUGAACAUGGCCUGAGG | 1193 |
| NM_001735.2_242-260_s | 242-260 | UUCAUUUAUCCUCAGAGAA | 625 | UUCUCUGAGGAUAAAUGAA | 1194 |
| NM_001735.2_252-270_s | 252-270 | CUCAGAGAAUAAAUUCCAA | 626 | UUGGAAUUUAUUCUCUGAG | 1195 |
| NM_001735.2_259-277_s | 259-277 | AAUAAAUUCCAAAACUCUG | 627 | CAGAGUUUUGGAAUUUAUU | 1196 |
| NM_001735.2_273-291_s | 273-291 | CUCUGCAAUCUUAACAAUA | 628 | UAUUGUUAAGAUUGCAGAG | 1197 |
| NM_001735.2_282-300_s | 282-300 | CUUAACAAUACAACCAAAA | 629 | UUUUGGUUGUAUUGUUAAG | 1198 |
| NM_001735.2_292-310_s | 292-310 | CAACCAAAACAAUUGCCUG | 630 | CAGGCAAUUGUUUUGGUUG | 1199 |
| NM_001735.2_301-319_s | 301-319 | CAAUUGCCUGGAGGACAAA | 631 | UUUGUCCUCCAGGCAAUUG | 1200 |
| NM_001735.2_313-331_s | 313-331 | GGACAAAACCCAGUUUCUU | 632 | AAGAAACUGGGUUUUGUCC | 1201 |
| NM_001735.2_322-340_s | 322-340 | CCAGUUUCUUAUGUGUAUU | 633 | AAUACACAUAAGAAACUGG | 1202 |
| NM_001735.2_332-350_s | 332-350 | AUGUGUAUUUGGAAGUUGU | 634 | ACAACUUCCAAAUACACAU | 1203 |
| NM_001735.2_342-360_s | 342-360 | GGAAGUUGUAUCAAAGCAU | 635 | AUGCUUUGAUACAACUUCC | 1204 |
| NM_001735.2_349-367_s | 349-367 | GUAUCAAAGCAUUUUUCAA | 636 | UUGAAAAAUGCUUUGAUAC | 1205 |
| NM_001735.2_361-379_s | 361-379 | UUUUCAAAAUCAAAAAGAA | 637 | UUCUUUUUGAUUUUGAAAA | 1206 |
| NM_001735.2_371-389_s | 371-389 | CAAAAAGAAUGCCAAUAAC | 638 | GUUAUUGGCAUUCUUUUUG | 1207 |
| NM_001735.2_381-399_s | 381-399 | GCCAAUAACCUAUGACAAU | 639 | AUUGUCAUAGGUUAUUGGC | 1208 |
| NM_001735.2_389-407_s | 389-407 | CCUAUGACAAUGGAUUUCU | 640 | AGAAAUCCAUUGUCAUAGG | 1209 |
| NM_001735.2_399-417_s | 399-417 | UGGAUUUCUCUUCAUUCAU | 641 | AUGAAUGAAGAGAAAUCCA | 1210 |
| NM_001735.2_411-429_s | 411-429 | CAUUCAUACAGACAAACCU | 642 | AGGUUUGUCUGUAUGAAUG | 1211 |
| NM_001735.2_419-437_s | 419-437 | CAGACAAACCUGUUUAUAC | 643 | GUAUAAACAGGUUUGUCUG | 1212 |
| NM_001735.2_430-448_s | 430-448 | GUUUAUACUCCAGACCAGU | 644 | ACUGGUCUGGAGUAUAAAC | 1213 |
| NM_001735.2_441-459_s | 441-459 | AGACCAGUCAGUAAAAGUU | 645 | AACUUUUACUGACUGGUCU | 1214 |
| NM_001735.2_450-468_s | 450-468 | AGUAAAAGUUAGAGUUUAU | 646 | AUAAACUCUAACUUUUACU | 1215 |
| NM_001735.2_460-478_s | 460-478 | AGAGUUUAUUCGUUGAAUG | 647 | CAUUCAACGAAUAAACUCU | 1216 |
| NM_001735.2_470-488_s | 470-488 | CGUUGAAUGACGACUUGAA | 648 | UUCAAGUCGUCAUUCAACG | 1217 |
| NM_001735.2_483-501_s | 483-501 | CUUGAAGCCAGCCAAAAGA | 649 | UCUUUUGGCUGGCUUCAAG | 1218 |
| NM_001735.2_490-508_s | 490-508 | CCAGCCAAAAGAGAAACUG | 650 | CAGUUUCUCUUUUGGCUGG | 1219 |
| NM_001735.2_503-521_s | 503-521 | AAACUGUCUUAACUUUCAU | 651 | AUGAAAGUUAAGACAGUUU | 1220 |
| NM_001735.2_513-531_s | 513-531 | AACUUUCAUAGAUCCUGAA | 652 | UUCAGGAUCUAUGAAAGUU | 1221 |
| NM_001735.2_519-537_s | 519-537 | CAUAGAUCCUGAAGGAUCA | 653 | UGAUCCUUCAGGAUCUAUG | 1222 |
| NM_001735.2_529-547_s | 529-547 | GAAGGAUCAGAAGUUGACA | 654 | UGUCAACUUCUGAUCCUUC | 1223 |
| NM_001735.2_543-561_s | 543-561 | UGACAUGGUAGAAGAAAUU | 655 | AAUUUCUUCUACCAUGUCA | 1224 |
| NM_001735.2_553-571_s | 553-571 | GAAGAAAUUGAUCAUAUUG | 656 | CAAUAUGAUCAAUUUCUUC | 1225 |
| NM_001735.2_562-580_s | 562-580 | GAUCAUAUUGGAAUUAUCU | 657 | AGAUAAUUCCAAUAUGAUC | 1226 |
| NM_001735.2_571-589_s | 571-589 | GGAAUUAUCUCUUUUCCUG | 658 | CAGGAAAAGAGAUAAUUCC | 1227 |
| NM_001735.2_579-597_s | 579-597 | CUCUUUUCCUGACUUCAAG | 659 | CUUGAAGUCAGGAAAAGAG | 1228 |
| NM_001735.2_590-608_s | 590-608 | ACUUCAAGAUUCCGUCUAA | 660 | UUAGACGGAAUCUUGAAGU | 1229 |
| NM_001735.2_601-619_s | 601-619 | CCGUCUAAUCCUAGAUAUG | 661 | CAUAUCUAGGAUUAGACGG | 1230 |
| NM_001735.2_610-628_s | 610-628 | CCUAGAUAUGGUAUGUGGA | 662 | UCCACAUACCAUAUCUAGG | 1231 |
| NM_001735.2_623-641_s | 623-641 | UGUGGACGAUCAAGGCUAA | 663 | UUAGCCUUGAUCGUCCACA | 1232 |
| NM_001735.2_629-647_s | 629-647 | CGAUCAAGGCUAAAUAUAA | 664 | UUAUAUUUAGCCUUGAUCG | 1233 |
| NM_001735.2_642-660_s | 642-660 | AUAUAAAGAGGACUUUUCA | 665 | UGAAAAGUCCUCUUUAUAU | 1234 |
| NM_001735.2_649-667_s | 649-667 | GAGGACUUUUCAACAACUG | 666 | CAGUUGUUGAAAAGUCCUC | 1235 |
| NM_001735.2_662-680_s | 662-680 | CAACUGGAACCGCAUAUUU | 667 | AAAUAUGCGGUUCCAGUUG | 1236 |
| NM_001735.2_672-690_s | 672-690 | CGCAUAUUUUGAAGUUAAA | 668 | UUUAACUUCAAAAUAUGCG | 1237 |
| NM_001735.2_683-701_s | 683-701 | AAGUUAAAGAAUAUGUCUU | 669 | AAGACAUAUUCUUUAACUU | 1238 |
| NM_001735.2_691-709_s | 691-709 | GAAUAUGUCUUGCCACAUU | 670 | AAUGUGGCAAGACAUAUUC | 1239 |
| NM_001735.2_703-721_s | 703-721 | CCACAUUUUUCUGUCUCAA | 671 | UUGAGACAGAAAAAUGUGG | 1240 |
| NM_001735.2_713-731_s | 713-731 | CUGUCUCAAUCGAGCCAGA | 672 | UCUGGCUCGAUUGAGACAG | 1241 |
| NM_001735.2_719-737_s | 719-737 | CAAUCGAGCCAGAAUAUAA | 673 | UUAUAUUCUGGCUCGAUUG | 1242 |
| NM_001735.2_730-748_s | 730-748 | GAAUAUAAUUUCAUUGGUU | 674 | AACCAAUGAAAUUAUAUUC | 1243 |
| NM_001735.2_742-760_s | 742-760 | AUUGGUUACAAGAACUUUA | 675 | UAAAGUUCUUGUAACCAAU | 1244 |
| NM_001735.2_752-770_s | 752-770 | AGAACUUUAAGAAUUUUGA | 676 | UCAAAAUUCUUAAAGUUCU | 1245 |
| NM_001735.2_762-780_s | 762-780 | GAAUUUUGAAAUUACUAUA | 677 | UAUAGUAAUUUCAAAAUUC | 1246 |
| NM_001735.2_769-787_s | 769-787 | GAAAUUACUAUAAAAGCAA | 678 | UUGCUUUUAUAGUAAUUUC | 1247 |
| NM_001735.2_781-799_s | 781-799 | AAAGCAAGAUAUUUUUAUA | 679 | UAUAAAAAUAUCUUGCUUU | 1248 |
| NM_001735.2_789-807_s | 789-807 | AUAUUUUUAUAAUAAAGUA | 680 | UACUUUAUUAUAAAAAUAU | 1249 |
| NM_001735.2_803-821_s | 803-821 | AAGUAGUCACUGAGGCUGA | 681 | UCAGCCUCAGUGACUACUU | 1250 |
| NM_001735.2_810-828_s | 810-828 | CACUGAGGCUGACGUUUAU | 682 | AUAAACGUCAGCCUCAGUG | 1251 |
| NM_001735.2_822-840_s | 822-840 | CGUUUAUAUCACAUUUGGA | 683 | UCCAAAUGUGAUAUAAACG | 1252 |
| NM_001735.2_831-849_s | 831-849 | CACAUUUGGAAUAAGAGAA | 684 | UUCUCUUAUUCCAAAUGUG | 1253 |
| NM_001735.2_840-858_s | 840-858 | AAUAAGAGAAGACUUAAAA | 685 | UUUUAAGUCUUCUCUUAUU | 1254 |
| NM_001735.2_852-870_s | 852-870 | CUUAAAAGAUGAUCAAAAA | 686 | UUUUUGAUCAUCUUUUAAG | 1255 |
| NM_001735.2_859-877_s | 859-877 | GAUGAUCAAAAAGAAAUGA | 687 | UCAUUUCUUUUUGAUCAUC | 1256 |
| NM_001735.2_872-890_s | 872-890 | AAAUGAUGCAAACAGCAAU | 688 | AUUGCUGUUUGCAUCAUUU | 1257 |
| NM_001735.2_883-901_s | 883-901 | ACAGCAAUGCAAAACACAA | 689 | UUGUGUUUUGCAUUGCUGU | 1258 |
| NM_001735.2_893-911_s | 893-911 | AAAACACAAUGUUGAUAAA | 690 | UUUAUCAACAUUGUGUUUU | 1259 |
| NM_001735.2_899-917_s | 899-917 | CAAUGUUGAUAAAUGGAAU | 691 | AUUCCAUUUAUCAACAUUG | 1260 |
| NM_001735.2_913-931_s | 913-931 | GGAAUUGCUCAAGUCACAU | 692 | AUGUGACUUGAGCAAUUCC | 1261 |
| NM_001735.2_919-937_s | 919-937 | GCUCAAGUCACAUUUGAUU | 693 | AAUCAAAUGUGACUUGAGC | 1262 |
| NM_001735.2_930-948_s | 930-948 | AUUUGAUUCUGAAACAGCA | 694 | UGCUGUUUCAGAAUCAAAU | 1263 |
| NM_001735.2_939-957_s | 939-957 | UGAAACAGCAGUCAAAGAA | 695 | UUCUUUGACUGCUGUUUCA | 1264 |
| NM_001735.2_951-969_s | 951-969 | CAAAGAACUGUCAUACUAC | 696 | GUAGUAUGACAGUUCUUUG | 1265 |
| NM_001735.2_962-980_s | 962-980 | CAUACUACAGUUUAGAAGA | 697 | UCUUCUAAACUGUAGUAUG | 1266 |
| NM_001735.2_969-987_s | 969-987 | CAGUUUAGAAGAUUUAAAC | 698 | GUUUAAAUCUUCUAAACUG | 1267 |
| NM_001735.2_983-1001_s | 983-1001 | UAAACAACAAGUACCUUUA | 699 | UAAAGGUACUUGUUGUUUA | 1268 |
| NM_001735.2_990-1008_s | 990-1008 | CAAGUACCUUUAUAUUGCU | 700 | AGCAAUAUAAAGGUACUUG | 1269 |
| NM_001735.2_1002-1020_s | 1002-1020 | UAUUGCUGUAACAGUCAUA | 701 | UAUGACUGUUACAGCAAUA | 1270 |
| NM_001735.2_1011-1029_s | 1011-1029 | AACAGUCAUAGAGUCUACA | 702 | UGUAGACUCUAUGACUGUU | 1271 |
| NM_001735.2_1020-1038_s | 1020-1038 | AGAGUCUACAGGUGGAUUU | 703 | AAAUCCACCUGUAGACUCU | 1272 |
| NM_001735.2_1033-1051_s | 1033-1051 | GGAUUUUCUGAAGAGGCAG | 704 | CUGCCUCUUCAGAAAAUCC | 1273 |
| NM_001735.2_1042-1060_s | 1042-1060 | GAAGAGGCAGAAAUACCUG | 705 | CAGGUAUUUCUGCCUCUUC | 1274 |
| NM_001735.2_1050-1068_s | 1050-1068 | AGAAAUACCUGGCAUCAAA | 706 | UUUGAUGCCAGGUAUUUCU | 1275 |
| NM_001735.2_1061-1079_s | 1061-1079 | GCAUCAAAUAUGUCCUCUC | 707 | GAGAGGACAUAUUUGAUGC | 1276 |
| NM_001735.2_1071-1089_s | 1071-1089 | UGUCCUCUCUCCCUACAAA | 708 | UUUGUAGGGAGAGAGGACA | 1277 |
| NM_001735.2_1092-1110_s | 1092-1110 | GAAUUUGGUUGCUACUCCU | 709 | AGGAGUAGCAACCAAAUUC | 1278 |
| NM_001735.2_1102-1120_s | 1102-1120 | GCUACUCCUCUUUUCCUGA | 710 | UCAGGAAAAGAGGAGUAGC | 1279 |
| NM_001735.2_1109-1127_s | 1109-1127 | CUCUUUUCCUGAAGCCUGG | 711 | CCAGGCUUCAGGAAAAGAG | 1280 |
| NM_001735.2_1123-1141_s | 1123-1141 | CCUGGGAUUCCAUAUCCCA | 712 | UGGGAUAUGGAAUCCCAGG | 1281 |
| NM_001735.2_1133-1151_s | 1133-1151 | CAUAUCCCAUCAAGGUGCA | 713 | UGCACCUUGAUGGGAUAUG | 1282 |
| NM_001735.2_1139-1157_s | 1139-1157 | CCAUCAAGGUGCAGGUUAA | 714 | UUAACCUGCACCUUGAUGG | 1283 |
| NM_001735.2_1150-1168_s | 1150-1168 | CAGGUUAAAGAUUCGCUUG | 715 | CAAGCGAAUCUUUAACCUG | 1284 |
| NM_001735.2_1161-1179_s | 1161-1179 | UUCGCUUGACCAGUUGGUA | 716 | UACCAACUGGUCAAGCGAA | 1285 |
| NM_001735.2_1170-1188_s | 1170-1188 | CCAGUUGGUAGGAGGAGUC | 717 | GACUCCUCCUACCAACUGG | 1286 |
| NM_001735.2_1180-1198_s | 1180-1198 | GGAGGAGUCCCAGUAACAC | 718 | GUGUUACUGGGACUCCUCC | 1287 |
| NM_001735.2_1190-1208_s | 1190-1208 | CAGUAACACUGAAUGCACA | 719 | UGUGCAUUCAGUGUUACUG | 1288 |
| NM_001735.2_1200-1218_s | 1200-1218 | GAAUGCACAAACAAUUGAU | 720 | AUCAAUUGUUUGUGCAUUC | 1289 |
| NM_001735.2_1209-1227_s | 1209-1227 | AACAAUUGAUGUAAACCAA | 721 | UUGGUUUACAUCAAUUGUU | 1290 |
| NM_001735.2_1220-1238_s | 1220-1238 | UAAACCAAGAGACAUCUGA | 722 | UCAGAUGUCUCUUGGUUUA | 1291 |
| NM_001735.2_1232-1250_s | 1232-1250 | CAUCUGACUUGGAUCCAAG | 723 | CUUGGAUCCAAGUCAGAUG | 1292 |
| NM_001735.2_1243-1261_s | 1243-1261 | GAUCCAAGCAAAAGUGUAA | 724 | UUACACUUUUGCUUGGAUC | 1293 |
| NM_001735.2_1251-1269_s | 1251-1269 | CAAAAGUGUAACACGUGUU | 725 | AACACGUGUUACACUUUUG | 1294 |
| NM_001735.2_1260-1278_s | 1260-1278 | AACACGUGUUGAUGAUGGA | 726 | UCCAUCAUCAACACGUGUU | 1295 |
| NM_001735.2_1272-1290_s | 1272-1290 | UGAUGGAGUAGCUUCCUUU | 727 | AAAGGAAGCUACUCCAUCA | 1296 |
| NM_001735.2_1279-1297_s | 1279-1297 | GUAGCUUCCUUUGUGCUUA | 728 | UAAGCACAAAGGAAGCUAC | 1297 |
| NM_001735.2_1293-131l_s | 1293-1311 | GCUUAAUCUCCCAUCUGGA | 729 | UCCAGAUGGGAGAUUAAGC | 1298 |
| NM_001735.2_1303-1321_s | 1303-1321 | CCAUCUGGAGUGACGGUGC | 730 | GCACCGUCACUCCAGAUGG | 1299 |
| NM_001735.2_1313-1331_s | 1313-1331 | UGACGGUGCUGGAGUUUAA | 731 | UUAAACUCCAGCACCGUCA | 1300 |
| NM_001735.2_1320-1338_s | 1320-1338 | GCUGGAGUUUAAUGUCAAA | 732 | UUUGACAUUAAACUCCAGC | 1301 |
| NM_001735.2_1332-1350_s | 1332-1350 | UGUCAAAACUGAUGCUCCA | 733 | UGGAGCAUCAGUUUUGACA | 1302 |
| NM_001735.2_1342-1360_s | 1342-1360 | GAUGCUCCAGAUCUUCCAG | 734 | CUGGAAGAUCUGGAGCAUC | 1303 |
| NM_001735.2_1349-1367_s | 1349-1367 | CAGAUCUUCCAGAAGAAAA | 735 | UUUUCUUCUGGAAGAUCUG | 1304 |
| NM_001735.2_1362-1380_s | 1362-1380 | AGAAAAUCAGGCCAGGGAA | 736 | UUCCCUGGCCUGAUUUUCU | 1305 |
| NM_001735.2_1371-1389_s | 1371-1389 | GGCCAGGGAAGGUUACCGA | 737 | UCGGUAACCUUCCCUGGCC | 1306 |
| NM_001735.2_1382-1400_s | 1382-1400 | GUUACCGAGCAAUAGCAUA | 738 | UAUGCUAUUGCUCGGUAAC | 1307 |
| NM_001735.2_1393-1411_s | 1393-1411 | AUAGCAUACUCAUCUCUCA | 739 | UGAGAGAUGAGUAUGCUAU | 1308 |
| NM_001735.2_1399-1417_s | 1399-1471 | UACUCAUCUCUCAGCCAAA | 740 | UUUGGCUGAGAGAUGAGUA | 1309 |
| NM_001735.2_1412-1430_s | 1412-1430 | GCCAAAGUUACCUUUAUAU | 741 | AUAUAAAGGUAACUUUGGC | 1310 |
| NM_001735.2_1422-1440_s | 1422-1440 | CCUUUAUAUUGAUUGGACU | 742 | AGUCCAAUCAAUAUAAAGG | 1311 |
| NM_001735.2_1432-1450_s | 1432-1450 | GAUUGGACUGAUAACCAUA | 743 | UAUGGUUAUCAGUCCAAUC | 1312 |
| NM_001735.2_1439-1457_s | 1439-1457 | CUGAUAACCAUAAGGCUUU | 744 | AAAGCCUUAUGGUUAUCAG | 1313 |
| NM_001735.2_1451-1469_s | 1451-1469 | AGGCUUUGCUAGUGGGAGA | 745 | UCUCCCACUAGCAAAGCCU | 1314 |
| NM_001735.2_1462-1480_s | 1462-1480 | GUGGGAGAACAUCUGAAUA | 746 | UAUUCAGAUGUUCUCCCAC | 1315 |
| NM_001735.2_1471-1489_s | 1471-1489 | CAUCUGAAUAUUAUUGUUA | 747 | UAACAAUAAUAUUCAGAUG | 1316 |
| NM_001735.2_1479-1497_s | 1479-1497 | UAUUAUUGUUACCCCCAAA | 748 | UUUGGGGGUAACAAUAAUA | 1317 |
| NM_001735.2_1492-1510_s | 1492-1510 | CCCAAAAGCCCAUAUAUUG | 749 | CAAUAUAUGGGCUUUUGGG | 1318 |
| NM_001735.2_1493-1511_s | 1493-1511 | CCAAAAGCCCAUAUAUUGA | 750 | UCAAUAUAUGGGCUUUUGG | 1319 |
| NM_001735.2_1494-1512_s | 1494-1512 | CAAAAGCCCAUAUAUUGAC | 751 | GUCAAUAUAUGGGCUUUUG | 1320 |
| NM_001735.2_1495-1513_s | 1495-1513 | AAAAGCCCAUAUAUUGACA | 752 | UGUCAAUAUAUGGGCUUUU | 1321 |
| NM_001735.2_1496-1514_s | 1496-1514 | AAAGCCCAUAUAUUGACAA | 753 | UUGUCAAUAUAUGGGCUUU | 1322 |
| NM_001735.2_1497-1515_s | 1497-1515 | AAGCCCAUAUAUUGACAAA | 754 | UUUGUCAAUAUAUGGGCUU | 1323 |
| NM_001735.2_1498-1516_s | 1498-1516 | AGCCCAUAUAUUGACAAAA | 755 | UUUUGUCAAUAUAUGGGCU | 1324 |
| NM_001735.2_1499-1517_s | 1499-1517 | GCCCAUAUAUUGACAAAAU | 756 | AUUUUGUCAAUAUAUGGGC | 1325 |
| NM_001735.2_1500-1518_s | 1500-1518 | CCCAUAUAUUGACAAAAUA | 757 | UAUUUUGUCAAUAUAUGGG | 1326 |
| NM_001735.2_1501-1519_s | 1501-1519 | CCAUAUAUUGACAAAAUAA | 758 | UUAUUUUGUCAAUAUAUGG | 1327 |
| NM_001735.2_1502-1520_s | 1502-1520 | CAUAUAUUGACAAAAUAAC | 759 | GUUAUUUUGUCAAUAUAUG | 1328 |
| NM_001735.2_1503-1521_s | 1503-1521 | AUAUAUUGACAAAAUAACU | 760 | AGUUAUUUUGUCAAUAUAU | 1329 |
| NM_001735.2_1504-1522_s | 1504-1522 | UAUAUUGACAAAAUAACUC | 761 | GAGUUAUUUUGUCAAUAUA | 1330 |
| NM_001735.2_1505-1523_s | 1505-1523 | AUAUUGACAAAAUAACUCA | 762 | UGAGUUAUUUUGUCAAUAU | 1331 |
| NM_001735.2_1506-1524_s | 1506-1524 | UAUUGACAAAAUAACUCAC | 763 | GUGAGUUAUUUUGUCAAUA | 1332 |
| NM_001735.2_1507-1525_s | 1507-1525 | AUUGACAAAAUAACUCACU | 764 | AGUGAGUUAUUUUGUCAAU | 1333 |
| NM_001735.2_1508-1526_s | 1508-1526 | UUGACAAAAUAACUCACUA | 765 | UAGUGAGUUAUUUUGUCAA | 1334 |
| NM_001735.2_1509-1527_s | 1509-1527 | UGACAAAAUAACUCACUAU | 766 | AUAGUGAGUUAUUUUGUCA | 1335 |
| NM_001735.2_1510-1528_s | 1510-1528 | GACAAAAUAACUCACUAUA | 767 | UAUAGUGAGUUAUUUUGUC | 1336 |
| NM_001735.2_1513-1531_s | 1513-1531 | AAAAUAACUCACUAUAAUU | 768 | AAUUAUAGUGAGUUAUUUU | 1337 |
| NM_001735.2_1514-1532_s | 1514-1532 | AAAUAACUCACUAUAAUUA | 769 | UAAUUAUAGUGAGUUAUUU | 1338 |
| NM_001735.2_1515-1533_s | 1515-1533 | AAUAACUCACUAUAAUUAC | 770 | GUAAUUAUAGUGAGUUAUU | 1339 |
| NM_001735.2_1516-1534_s | 1516-1534 | AUAACUCACUAUAAUUACU | 771 | AGUAAUUAUAGUGAGUUAU | 1340 |
| NM_001735.2_1518-1536_s | 1518-1536 | AACUCACUAUAAUUACUUG | 772 | CAAGUAAUUAUAGUGAGUU | 1341 |
| NM_001735.2_1519-1537_s | 1519-1537 | ACUCACUAUAAUUACUUGA | 773 | UCAAGUAAUUAUAGUGAGU | 1342 |
| NM_001735.2_1520-1538_s | 1520-1538 | CUCACUAUAAUUACUUGAU | 774 | AUCAAGUAAUUAUAGUGAG | 1343 |
| NM_001735.2_1521-1539_s | 1521-1539 | UCACUAUAAUUACUUGAUU | 775 | AAUCAAGUAAUUAUAGUGA | 1344 |
| NM_001735.2_1523-1541_s | 1523-1541 | ACUAUAAUUACUUGAUUUU | 776 | AAAAUCAAGUAAUUAUAGU | 1345 |
| NM_001735.2_1524-1542_s | 1524-1542 | CUAUAAUUACUUGAUUUUA | 777 | UAAAAUCAAGUAAUUAUAG | 1346 |
| NM_001735.2_1525-1543_s | 1525-1543 | UAUAAUUACUUGAUUUUAU | 778 | AUAAAAUCAAGUAAUUAUA | 1347 |
| NM_001735.2_1526-1544_s | 1526-1544 | AUAAUUACUUGAUUUUAUC | 779 | GAUAAAAUCAAGUAAUUAU | 1348 |
| NM_001735.2_1527-1545_s | 1527-1545 | UAAUUACUUGAUUUUAUCC | 780 | GGAUAAAAUCAAGUAAUUA | 1349 |
| NM_001735.2_1528-1546_s | 1528-1546 | AAUUACUUGAUUUUAUCCA | 781 | UGGAUAAAAUCAAGUAAUU | 1350 |
| NM_001735.2_1529-1547_s | 1529-1547 | AUUACUUGAUUUUAUCCAA | 782 | UUGGAUAAAAUCAAGUAAU | 1351 |
| NM_001735.2_1540-1558_s | 1540-1558 | UUAUCCAAGGGCAAAAUUA | 783 | UAAUUUUGCCCUUGGAUAA | 1352 |
| NM_001735.2_1550-1568_s | 1550-1568 | GCAAAAUUAUCCACUUUGG | 784 | CCAAAGUGGAUAAUUUUGC | 1353 |
| NM_001735.2_1561-1579_s | 1561-1579 | CACUUUGGCACGAGGGAGA | 785 | UCUCCCUCGUGCCAAAGUG | 1354 |
| NM_001735.2_1571-1589_s | 1571-1589 | CGAGGGAGAAAUUUUCAGA | 786 | UCUGAAAAUUUCUCCCUCG | 1355 |
| NM_001735.2_1581-1599_s | 1581-1599 | AUUUUCAGAUGCAUCUUAU | 787 | AUAAGAUGCAUCUGAAAAU | 1356 |
| NM_001735.2_1591-1609_s | 1591-1609 | GCAUCUUAUCAAAGUAUAA | 788 | UUAUACUUUGAUAAGAUGC | 1357 |
| NM_001735.2_1600-1618_s | 1600-1618 | CAAAGUAUAAACAUUCCAG | 789 | CUGGAAUGUUUAUACUUUG | 1358 |
| NM_001735.2_1612-1630_s | 1612-1630 | AUUCCAGUAACACAGAACA | 790 | UGUUCUGUGUUACUGGAAU | 1359 |
| NM_001735.2_1622-1640_s | 1622-1640 | CACAGAACAUGGUUCCUUC | 791 | GAAGGAACCAUGUUCUGUG | 1360 |
| NM_001735.2_1632-1650_s | 1632-1560 | GGUUCCUUCAUCCCGACUU | 792 | AAGUCGGGAUGAAGGAACC | 1361 |
| NM_001735.2_1643-1661_s | 1643-1661 | CCCGACUUCUGGUCUAUUA | 793 | UAAUAGACCAGAAGUCGGG | 1362 |
| NM_001735.2_1653-1671_s | 1653-1671 | GGUCUAUUACAUCGUCACA | 794 | UGUGACGAUGUAAUAGACC | 1363 |
| NM_001735.2_1663-1681_s | 1663-1681 | AUCGUCACAGGAGAACAGA | 795 | UCUGUUCUCCUGUGACGAU | 1364 |
| NM_001735.2_1670-1688_s | 1670-1688 | CAGGAGAACAGACAGCAGA | 796 | UCUGCUGUCUGUUCUCCUG | 1365 |
| NM_001735.2_1682-1700_s | 1682-1700 | CAGCAGAAUUAGUGUCUGA | 797 | UCAGACACUAAUUCUGCUG | 1366 |
| NM_001735.2_1693-1711_s | 1693-1711 | GUGUCUGAUUCAGUCUGGU | 798 | ACCAGACUGAAUCAGACAC | 1367 |
| NM_001735.2_1703-1721_s | 1703-1721 | CAGUCUGGUUAAAUAUUGA | 799 | UCAAUAUUUAACCAGACUG | 1368 |
| NM_001735.2_1710-1728_s | 1710-1728 | GUUAAAUAUUGAAGAAAAA | 800 | UUUUUCUUCAAUAUUUAAC | 1369 |
| NM_001735.2_1722-1740_s | 1722-1740 | AGAAAAAUGUGGCAACCAG | 801 | CUGGUUGCCACAUUUUUCU | 1370 |
| NM_001735.2_1733-1751_s | 1733-1751 | GCAACCAGCUCCAGGUUCA | 802 | UGAACCUGGAGCUGGUUGC | 1371 |
| NM_001735.2_1740-1758_s | 1740-1758 | GCUCCAGGUUCAUCUGUCU | 803 | AGACAGAUGAACCUGGAGC | 1372 |
| NM_001735.2_1751-1769_s | 1751-1769 | AUCUGUCUCCUGAUGCAGA | 804 | UCUGCAUCAGGAGACAGAU | 1373 |
| NM_001735.2_1762-1780_s | 1762-1780 | GAUGCAGAUGCAUAUUCUC | 805 | GAGAAUAUGCAUCUGCAUC | 1374 |
| NM_001735.2_1771-1789_s | 1771-1789 | GCAUAUUCUCCAGGCCAAA | 806 | UUUGGCCUGGAGAAUAUGC | 1375 |
| NM_001735.2_1782-1800_s | 1782-1800 | AGGCCAAACUGUGUCUCUU | 807 | AAGAGACACAGUUUGGCCU | 1376 |
| NM_001735.2_1792-1810_s | 1792-1810 | GUGUCUCUUAAUAUGGCAA | 808 | UUGCCAUAUUAAGAGACAC | 1377 |
| NM_001735.2_1799-1817_s | 1799-1817 | UUAAUAUGGCAACUGGAAU | 809 | AUUCCAGUUGCCAUAUUAA | 1378 |
| NM_001735.2_1809-1827_s | 1809-1827 | AACUGGAAUGGAUUCCUGG | 810 | CCAGGAAUCCAUUCCAGUU | 1379 |
| NM_001735.2_1821-1839_s | 1821-1839 | UUCCUGGGUGGCAUUAGCA | 811 | UGCUAAUGCCACCCAGGAA | 1380 |
| NM_001735.2_1830-1848_s | 1830-1848 | GGCAUUAGCAGCAGUGGAC | 812 | GUCCACUGCUGCUAAUGCC | 1381 |
| NM_001735.2_1842-1860_s | 1842-1860 | AGUGGACAGUGCUGUGUAU | 813 | AUACACAGCACUGUCCACU | 1382 |
| NM_001735.2_1852-1870_s | 1852-1870 | GCUGUGUAUGGAGUCCAAA | 814 | UUUGGACUCCAUACACAGC | 1383 |
| NM_001735.2_1863-1881_s | 1863-1881 | AGUCCAAAGAGGAGCCAAA | 815 | UUUGGCUCCUCUUUGGACU | 1384 |
| NM_001735.2_1870-1888_s | 1870-1888 | AGAGGAGCCAAAAAGCCCU | 816 | AGGGCUUUUUGGCUCCUCU | 1385 |
| NM_001735.2_1883-1901_s | 1883-1901 | AGCCCUUGGAAAGAGUAUU | 817 | AAUACUCUUUCCAAGGGCU | 1386 |
| NM_001735.2_1893-1911_s | 1893-1911 | AAGAGUAUUUCAAUUCUUA | 818 | UAAGAAUUGAAAUACUCUU | 1387 |
| NM_001735.2_1900-1918_s | 1900-1918 | UUUCAAUUCUUAGAGAAGA | 819 | UCUUCUCUAAGAAUUGAAA | 1388 |
| NM_001735.2_1912-1930_s | 1912-1930 | GAGAAGAGUGAUCUGGGCU | 820 | AGCCCAGAUCACUCUUCUC | 1389 |
| NM_001735.2_1920-1938_s | 1920-1938 | UGAUCUGGGCUGUGGGGCA | 821 | UGCCCCACAGCCCAGAUCA | 1390 |
| NM_001735.2_1933-1951_s | 1933-1951 | GGGGCAGGUGGUGGCCUCA | 822 | UGAGGCCACCACCUGCCCC | 1391 |
| NM_001735.2_1943-1961_s | 1943-1961 | GUGGCCUCAACAAUGCCAA | 823 | UUGGCAUUGUUGAGGCCAC | 1392 |
| NM_001735.2_1950-1968_s | 1950-1968 | CAACAAUGCCAAUGUGUUC | 824 | GAACACAUUGGCAUUGUUG | 1393 |
| NM_001735.2_1959-1977_s | 1959-1977 | CAAUGUGUUCCACCUAGCU | 825 | AGCUAGGUGGAACACAUUG | 1394 |
| NM_001735.2_1969-1987_s | 1969-1987 | CACCUAGCUGGACUUACCU | 826 | AGGUAAGUCCAGCUAGGUG | 1395 |
| NM_001735.2_1979-1997_s | 1979-1997 | GACUUACCUUCCUCACUAA | 827 | UUAGUGAGGAAGGUAAGUC | 1396 |
| NM_001735.2_1991-2009_s | 1991-2009 | UCACUAAUGCAAAUGCAGA | 828 | UCUGCAUUUGCAUUAGUGA | 1397 |
| NM_001735.2_2001-2019_s | 2001-2019 | AAAUGCAGAUGACUCCCAA | 829 | UUGGGAGUCAUCUGCAUUU | 1398 |
| NM_001735.2_2013-2031_s | 2013-2013 | CUCCCAAGAAAAUGAUGAA | 830 | UUCAUCAUUUUCUUGGGAG | 1399 |
| NM_001735.2_2032-2050_s | 2032-2050 | CCUUGUAAAGAAAUUCUCA | 831 | UGAGAAUUUCUUUACAAGG | 1400 |
| NM_001735.2_2043-2061_s | 2043-2061 | AAUUCUCAGGCCAAGAAGA | 832 | UCUUCUUGGCCUGAGAAUU | 1401 |
| NM_001735.2_2053-2071_s | 2053-2071 | CCAAGAAGAACGCUGCAAA | 833 | UUUGCAGCGUUCUUCUUGG | 1402 |
| NM_001735.2_2063-2081_s | 2063-2081 | CGCUGCAAAAGAAGAUAGA | 834 | UCUAUCUUCUUUUGCAGCG | 1403 |
| NM_001735.2 2070-2088_s | 2070-2088 | AAAGAAGAUAGAAGAAAUA | 835 | UAUUUCUUCUAUCUUCUUU | 1404 |
| NM_001735.2_2082-2100_s | 2082-2100 | AGAAAUAGCUGCUAAAUAU | 836 | AUAUUUAGCAGCUAUUUCU | 1405 |
| NM_001735.2_2089-2107_s | 2089-2107 | GCUGCUAAAUAUAAACAUU | 837 | AAUGUUUAUAUUUAGCAGC | 1406 |
| NM_001735.2_2103-2121_s | 2103-2121 | ACAUUCAGUAGUGAAGAAA | 838 | UUUCUUCACUACUGAAUGU | 1407 |
| NM_001735.2_2110-2128_s | 2110-2128 | GUAGUGAAGAAAUGUUGUU | 839 | AACAACAUUUCUUCACUAC | 1408 |
| NM_001735.2_2119-2137_s | 2119-2137 | AAAUGUUGUUACGAUGGAG | 840 | CUCCAUCGUAACAACAUUU | 1409 |
| NM_001735.2_2130-2148_s | 2130-2148 | CGAUGGAGCCUGCGUUAAU | 841 | AUUAACGCAGGCUCCAUCG | 1410 |
| NM_001735.2_2142-2160_s | 2142-2160 | CGUUAAUAAUGAUGAAACC | 842 | GGUUUCAUCAUUAUUAACG | 1411 |
| NM_001735.2_2150-2168_s | 2150-2168 | AUGAUGAAACCUGUGAGCA | 843 | UGCUCACAGGUUUCAUCAU | 1412 |
| NM_001735.2_2160-2178_s | 2160-2178 | CUGUGAGCAGCGAGCUGCA | 844 | UGCAGCUCGCUGCUCACAG | 1413 |
| NM_001735.2_2170-2188_s | 2170-2188 | CGAGCUGCACGGAUUAGUU | 845 | AACUAAUCCGUGCAGCUCG | 1414 |
| NM_001735.2_2180-2198_s | 2180-2198 | GGAUUAGUUUAGGGCCAAG | 846 | CUUGGCCCUAAACUAAUCC | 1415 |
| NM_001735.2_2191-2209_s | 2191-2209 | GGGCCAAGAUGCAUCAAAG | 847 | CUUUGAUGCAUCUUGGCCC | 1416 |
| NM_001735.2_2202-2220_s | 2202-2220 | CAUCAAAGCUUUCACUGAA | 848 | UUCAGUGAAAGCUUUGAUG | 1417 |
| NM_001735.2_2209-2227_s | 2209-2227 | GCUUUCACUGAAUGUUGUG | 849 | CACAACAUUCAGUGAAAGC | 1418 |
| NM_001735.2_2219-2237_s | 2219-2237 | AAUGUUGUGUCGUCGCAAG | 850 | CUUGCGACGACACAACAUU | 1419 |
| NM_001735.2_2229-2247_s | 2229-2247 | CGUCGCAAGCCAGCUCCGU | 851 | ACGGAGCUGGCUUGCGACG | 1420 |
| NM_001735.2_2241-2259_s | 2241-2259 | GCUCCGUGCUAAUAUCUCU | 852 | AGAGAUAUUAGCACGGAGC | 1421 |
| NM_001735.2_2249-2267_s | 2249-2267 | CUAAUAUCUCUCAUAAAGA | 853 | UCUUUAUGAGAGAUAUUAG | 1422 |
| NM_001735.2_2263-2281_s | 2263-2281 | AAAGACAUGCAAUUGGGAA | 854 | UUCCCAAUUGCAUGUCUUU | 1423 |
| NM_001735.2 2272-2290_s | 2272-2290 | CAAUUGGGAAGGCUACACA | 855 | UGUGUAGCCUUCCCAAUUG | 1424 |
| NM_001735.2_2283-2301_s | 2283-2301 | GCUACACAUGAAGACCCUG | 856 | CAGGGUCUUCAUGUGUAGC | 1425 |
| NM_001735.2_2289-2307_s | 2289-2307 | CAUGAAGACCCUGUUACCA | 857 | UGGUAACAGGGUCUUCAUG | 1426 |
| NM_001735.2_2303-2321_s | 2303-2321 | UACCAGUAAGCAAGCCAGA | 858 | UCUGGCUUGCUUACUGGUA | 1427 |
| NM_001735.2_2311-2329_s | 2311-2329 | AGCAAGCCAGAAAUUCGGA | 859 | UCCGAAUUUCUGGCUUGCU | 1428 |
| NM_001735.2_2319-2337_s | 2319-2337 | AGAAAUUCGGAGUUAUUUU | 860 | AAAAUAACUCCGAAUUUCU | 1429 |
| NM_001735.2 2329-2347_s | 2329-2347 | AGUUAUUUUCCAGAAAGCU | 861 | AGCUUUCUGGAAAAUAACU | 1430 |
| NM_001735.2_2339-2357_s | 2339-2357 | CAGAAAGCUGGUUGUGGGA | 862 | UCCCACAACCAGCUUUCUG | 1431 |
| NM_001735.2_2352-2370_s | 2352-2370 | GUGGGAAGUUCAUCUUGUU | 863 | AACAAGAUGAACUUCCCAC | 1432 |
| NM_001735.2_2361-2379_s | 2361-2379 | UCAUCUUGUUCCCAGAAGA | 864 | UCUUCUGGGAACAAGAUGA | 1433 |
| NM_001735.2_2372-2390_s | 2372-2390 | CCAGAAGAAAACAGUUGCA | 865 | UGCAACUGUUUUCUUCUGG | 1434 |
| NM_001735.2_2383-2401_s | 2383-2401 | CAGUUGCAGUUUGCCCUAC | 866 | GUAGGGCAAACUGCAACUG | 1435 |
| NM_001735.2_2389-2407_s | 2389-2407 | CAGUUUGCCCUACCUGAUU | 867 | AAUCAGGUAGGGCAAACUG | 1436 |
| NM_001735.2_2401-2419_s | 2401-2419 | CCUGAUUCUCUAACCACCU | 868 | AGGUGGUUAGAGAAUCAGG | 1437 |
| NM_001735.2_2413-2431_s | 2413-2431 | ACCACCUGGGAAAUUCAAG | 869 | CUUGAAUUUCCCAGGUGGU | 1438 |
| NM_001735.2_2422-2440_s | 2422-2440 | GAAAUUCAAGGCGUUGGCA | 870 | UGCCAACGCCUUGAAUUUC | 1439 |
| NM_001735.2_2433-2451_s | 2433-2451 | CGUUGGCAUUUCAAACACU | 871 | AGUGUUUGAAAUGCCAACG | 1440 |
| NM_001735.2_2439-2457_s | 2439-2457 | CAUUUCAAACACUGGUAUA | 872 | UAUACCAGUGUUUGAAAUG | 1441 |
| NM_001735.2_2453-2471_s | 2453-2471 | GUAUAUGUGUUGCUGAUAC | 873 | GUAUCAGCAACACAUAUAC | 1442 |
| NM_001735.2_2463-2481_s | 2463-2481 | UGCUGAUACUGUCAAGGCA | 874 | UGCCUUGACAGUAUCAGCA | 1443 |
| NM_001735.2_2471-2489_s | 2471-2489 | CUGUCAAGGCAAAGGUGUU | 875 | AACACCUUUGCCUUGACAG | 1444 |
| NM_001735.2_2483-2501_s | 2483-2501 | AGGUGUUCAAAGAUGUCUU | 876 | AAGACAUCUUUGAACACCU | 1445 |
| NM_001735.2_2490-2508_s | 2490-2508 | CAAAGAUGUCUUCCUGGAA | 877 | UUCCAGGAAGACAUCUUUG | 1446 |
| NM_001735.2_2499-2517_s | 2499-2517 | CUUCCUGGAAAUGAAUAUA | 878 | UAUAUUCAUUUCCAGGAAG | 1447 |
| NM_001735.2_2511-2529_s | 2511-2529 | GAAUAUACCAUAUUCUGUU | 879 | AACAGAAUAUGGUAUAUUC | 1448 |
| NM_001735.2_2520-2538_s | 2520-2538 | AUAUUCUGUUGUACGAGGA | 880 | UCCUCGUACAACAGAAUAU | 1449 |
| NM_001735.2_2533-2551_s | 2533-2551 | CGAGGAGAACAGAUCCAAU | 881 | AUUGGAUCUGUUCUCCUCG | 1450 |
| NM_001735.2_2539-2557_s | 2539-2557 | GAACAGAUCCAAUUGAAAG | 882 | CUUUCAAUUGGAUCUGUUC | 1451 |
| NM_001735.2_2553-2571_s | 2553-2571 | GAAAGGAACUGUUUACAAC | 883 | GUUGUAAACAGUUCCUUUC | 1452 |
| NM_001735.2_2560-2578_s | 2560-2578 | ACUGUUUACAACUAUAGGA | 884 | UCCUAUAGUUGUAAACAGU | 1453 |
| NM_001735.2_2569-2587_s | 2569-2587 | AACUAUAGGACUUCUGGGA | 885 | UCCCAGAAGUCCUAUAGUU | 1454 |
| NM_001735.2_2583-2601_s | 2583-2601 | UGGGAUGCAGUUCUGUGUU | 886 | AACACAGAACUGCAUCCCA | 1455 |
| NM_001735.2_2592-2610_s | 2592-2610 | GUUCUGUGUUAAAAUGUCU | 887 | AGACAUUUUAACACAGAAC | 1456 |
| NM_001735.2_2600-2618_s | 2600-2618 | UUAAAAUGUCUGCUGUGGA | 888 | UCCACAGCAGACAUUUUAA | 1457 |
| NM_001735.2_2612-2630_s | 2612-2630 | CUGUGGAGGGAAUCUGCAC | 889 | GUGCAGAUUCCCUCCACAG | 1458 |
| NM_001735.2_2620-2638_s | 2620-2638 | GGAAUCUGCACUUCGGAAA | 890 | UUUCCGAAGUGCAGAUUCC | 1459 |
| NM_001735.2_2633-2651_s | 2633-2651 | CGGAAAGCCCAGUCAUUGA | 891 | UCAAUGACUGGGCUUUCCG | 1460 |
| NM_001735.2_2641-2659_s | 2641-2659 | CCAGUCAUUGAUCAUCAGG | 892 | CCUGAUGAUCAAUGACUGG | 1461 |
| NM_001735.2_2653-2671_s | 2653-2671 | CAUCAGGGCACAAAGUCCU | 893 | AGGACUUUGUGCCCUGAUG | 1462 |
| NM_001735.2_2659-2677_s | 2659-2677 | GGCACAAAGUCCUCCAAAU | 894 | AUUUGGAGGACUUUGUGCC | 1463 |
| NM_001735.2 2673-2691_s | 2673-2691 | CAAAUGUGUGCGCCAGAAA | 895 | UUUCUGGCGCACACAUUUG | 1464 |
| NM_001735.2_2682-2700_s | 2682-2700 | GCGCCAGAAAGUAGAGGGC | 896 | GCCCUCUACUUUCUGGCGC | 1465 |
| NM_001735.2_2691-2709_s | 2691-2709 | AGUAGAGGGCUCCUCCAGU | 897 | ACUGGAGGAGCCCUCUACU | 1466 |
| NM_001735.2_2702-2720_s | 2702-2720 | CCUCCAGUCACUUGGUGAC | 898 | GUCACCAAGUGACUGGAGG | 1467 |
| NM_001735.2_2709-2727_s | 2709-2727 | UCACUUGGUGACAUUCACU | 899 | AGUGAAUGUCACCAAGUGA | 1468 |
| NM_001735.2_2720-2738_s | 2720-2738 | CAUUCACUGUGCUUCCUCU | 900 | AGAGGAAGCACAGUGAAUG | 1469 |
| NM_001735.2 2739-2757_s | 2739-2757 | GGAAAUUGGCCUUCACAAC | 901 | GUUGUGAAGGCCAAUUUCC | 1470 |
| NM_001735.2_2749-2767_s | 2749-2767 | CUUCACAACAUCAAUUUUU | 902 | AAAAAUUGAUGUUGUGAAG | 1471 |
| NM_001735.2_2761-2779_s | 2761-2779 | AAUUUUUCACUGGAGACUU | 903 | AAGUCUCCAGUGAAAAAUU | 1472 |
| NM_001735.2_2770-2788_s | 2770-2788 | CUGGAGACUUGGUUUGGAA | 904 | UUCCAAACCAAGUCUCCAG | 1473 |
| NM_001735.2_2780-2798_s | 2780-2798 | GGUUUGGAAAAGAAAUCUU | 905 | AAGAUUUCUUUUCCAAACC | 1474 |
| NM_001735.2_2793-2811_s | 2793-2811 | AAUCUUAGUAAAAACAUUA | 906 | UAAUGUUUUUACUAAGAUU | 1475 |
| NM_001735.2_2802-2820_s | 2802-2820 | AAAAACAUUACGAGUGGUG | 907 | CACCACUCGUAAUGUUUUU | 1476 |
| NM_001735.2_2813-2831_s | 2813-2831 | GAGUGGUGCCAGAAGGUGU | 908 | ACACCUUCUGGCACCACUC | 1477 |
| NM_001735.2_2823-2841_s | 2823-2841 | AGAAGGUGUCAAAAGGGAA | 909 | UUCCCUUUUGACACCUUCU | 1478 |
| NM_001735.2_2829-2847_s | 2829-2847 | UGUCAAAAGGGAAAGCUAU | 910 | AUAGCUUUCCCUUUUGACA | 1479 |
| NM_001735.2_2843-2861_s | 2843-2861 | GCUAUUCUGGUGUUACUUU | 911 | AAAGUAACACCAGAAUAGC | 1480 |
| NM_001735.2_2852-2870_s | 2852-2870 | GUGUUACUUUGGAUCCUAG | 912 | CUAGGAUCCAAAGUAACAC | 1481 |
| NM_001735.2_2862-2880_s | 2862-2880 | GGAUCCUAGGGGUAUUUAU | 913 | AUAAAUACCCCUAGGAUCC | 1482 |
| NM_001735.2_2872-2890_s | 2872-2890 | GGUAUUUAUGGUACCAUUA | 914 | UAAUGGUACCAUAAAUACC | 1483 |
| NM_001735.2 2882-2900_s | 2882-2900 | GUACCAUUAGCAGACGAAA | 915 | UUUCGUCUGCUAAUGGUAC | 1484 |
| NM_001735.2_2892-2910_s | 2892-2910 | CAGACGAAAGGAGUUCCCA | 916 | UGGGAACUCCUUUCGUCUG | 1485 |
| NM_001735.2_2900-2918_s | 2900-2918 | AGGAGUUCCCAUACAGGAU | 917 | AUCCUGUAUGGGAACUCCU | 1486 |
| NM_001735.2_2909-2927_s | 2909-2927 | CAUACAGGAUACCCUUAGA | 918 | UCUAAGGGUAUCCUGUAUG | 1487 |
| NM_001735.2_2922-2940_s | 2922-2940 | CUUAGAUUUGGUCCCCAAA | 919 | UUUGGGGACCAAAUCUAAG | 1488 |
| NM_001735.2_2933-2951_s | 2933-2951 | UCCCCAAAACAGAAAUCAA | 920 | UUGAUUUCUGUUUUGGGGA | 1489 |
| NM_001735.2_2941-2959_s | 2941-2959 | ACAGAAAUCAAAAGGAUUU | 921 | AAAUCCUUUUGAUUUCUGU | 1490 |
| NM_001735.2_2951-2969_s | 2951-2969 | AAAGGAUUUUGAGUGUAAA | 922 | UUUACACUCAAAAUCCUUU | 1491 |
| NM_001735.2_2962-2980_s | 2962-2980 | AGUGUAAAAGGACUGCUUG | 923 | CAAGCAGUCCUUUUACACU | 1492 |
| NM_001735.2_2969-2987_s | 2969-2987 | AAGGACUGCUUGUAGGUGA | 924 | UCACCUACAAGCAGUCCUU | 1493 |
| NM_001735.2_2980-2998_s | 2980-2998 | GUAGGUGAGAUCUUGUCUG | 925 | CAGACAAGAUCUCACCUAC | 1494 |
| NM_001735.2_2989-3007_s | 2989-3007 | AUCUUGUCUGCAGUUCUAA | 926 | UUAGAACUGCAGACAAGAU | 1495 |
| NM_001735.2_3001-3019_s | 3001-3019 | GUUCUAAGUCAGGAAGGCA | 927 | UGCCUUCCUGACUUAGAAC | 1496 |
| NM_001735.2_3013-3031_s | 3013-3031 | GAAGGCAUCAAUAUCCUAA | 928 | UUAGGAUAUUGAUGCCUUC | 1497 |
| NM_001735.2_3020-3038_s | 3020-3038 | UCAAUAUCCUAACCCACCU | 929 | AGGUGGGUUAGGAUAUUGA | 1498 |
| NM_001735.2_3033-3051_s | 3033-3051 | CCACCUCCCCAAAGGGAGU | 930 | ACUCCCUUUGGGGAGGUGG | 1499 |
| NM_001735.2_3039-3057_s | 3039-3057 | CCCCAAAGGGAGUGCAGAG | 931 | CUCUGCACUCCCUUUGGGG | 1500 |
| NM_001735.2_3050-3068_s | 3050-3068 | GUGCAGAGGCGGAGCUGAU | 932 | AUCAGCUCCGCCUCUGCAC | 1501 |
| NM_001735.2_3060-3078_s | 3060-3078 | GGAGCUGAUGAGCGUUGUC | 933 | GACAACGCUCAUCAGCUCC | 1502 |
| NM_001735.2_3072-3090_s | 3072-3090 | CGUUGUCCCAGUAUUCUAU | 934 | AUAGAAUACUGGGACAACG | 1503 |
| NM_001735.2_3079-3097_s | 3079-3097 | CCAGUAUUCUAUGUUUUUC | 935 | GAAAAACAUAGAAUACUGG | 1504 |
| NM_001735.2_3091-3109_s | 3091-3109 | GUUUUUCACUACCUGGAAA | 936 | UUUCCAGGUAGUGAAAAAC | 1505 |
| NM_001735.2_3102-3120_s | 3102-3120 | CCUGGAAACAGGAAAUCAU | 937 | AUGAUUUCCUGUUUCCAGG | 1506 |
| NM_001735.2_3122-3140_s | 3122-3140 | GGAACAUUUUUCAUUCUGA | 938 | UCAGAAUGAAAAAUGUUCC | 1507 |
| NM_001735.2_3133-3151_s | 3133-3151 | CAUUCUGACCCAUUAAUUG | 939 | CAAUUAAUGGGUCAGAAUG | 1508 |
| NM_001735.2_3142-3160_s | 3142-3160 | CCAUUAAUUGAAAAGCAGA | 940 | UCUGCUUUUCAAUUAAUGG | 1509 |
| NM_001735.2_3153-3171_s | 3153-3171 | AAAGCAGAAACUGAAGAAA | 941 | UUUCUUCAGUUUCUGCUUU | 1510 |
| NM_001735.2_3161-3179_s | 3161-3179 | AACUGAAGAAAAAAUUAAA | 942 | UUUAAUUUUUUCUUCAGUU | 1511 |
| NM_001735.2_3169-3187_s | 3169-3187 | AAAAAAUUAAAAGAAGGGA | 943 | UCCCUUCUUUUAAUUUUUU | 1512 |
| NM_001735.2_3183-3201_s | 3183-3201 | AGGGAUGUUGAGCAUUAUG | 944 | CAUAAUGCUCAACAUCCCU | 1513 |
| NM_001735.2_3192-3210_s | 3192-3210 | GAGCAUUAUGUCCUACAGA | 945 | UCUGUAGGACAUAAUGCUC | 1514 |
| NM_001735.2_3200-3218_s | 3200-3218 | UGUCCUACAGAAAUGCUGA | 946 | UCAGCAUUUCUGUAGGACA | 1515 |
| NM_001735.2_3211-3229_s | 3211-3229 | AAUGCUGACUACUCUUACA | 947 | UGUAAGAGUAGUCAGCAUU | 1516 |
| NM_001735.2_3220-3238_s | 3220-3238 | UACUCUUACAGUGUGUGGA | 948 | UCCACACACUGUAAGAGUA | 1517 |
| NM_001735.2_3229-3247_s | 3229-3247 | AGUGUGUGGAAGGGUGGAA | 949 | UUCCACCCUUCCACACACU | 1518 |
| NM_001735.2_3240-3258_s | 3240-3258 | GGGUGGAAGUGCUAGCACU | 950 | AGUGCUAGCACUUCCACCC | 1519 |
| NM_001735.2_3250-3268_s | 3250-3268 | GCUAGCACUUGGUUAACAG | 951 | CUGUUAACCAAGUGCUAGC | 1520 |
| NM_001735.2_3260-3278_s | 3260-3278 | GGUUAACAGCUUUUGCUUU | 952 | AAAGCAAAAGCUGUUAACC | 1521 |
| NM_001735.2_3273-3291_s | 3273-3291 | UGCUUUAAGAGUACUUGGA | 953 | UCCAAGUACUCUUAAAGCA | 1522 |
| NM_001735.2_3283-3301_s | 3283-3301 | GUACUUGGACAAGUAAAUA | 954 | UAUUUACUUGUCCAAGUAC | 1523 |
| NM_001735.2_3292-3310_s | 3292-3317 | CAAGUAAAUAAAUACGUAG | 955 | CUACGUAUUUAUUUACUUG | 1524 |
| NM_001735.2_3299-3317_s | 3299-3317 | AUAAAUACGUAGAGCAGAA | 956 | UUCUGCUCUACGUAUUUAU | 1525 |
| NM_001735.2_3310-3328_s | 3310-3328 | GAGCAGAACCAAAAUUCAA | 957 | UUGAAUUUUGGUUCUGCUC | 1526 |
| NM_001735.2_3322-3340_s | 3322-3340 | AAUUCAAUUUGUAAUUCUU | 958 | AAGAAUUACAAAUUGAAUU | 1527 |
| NM_001735.2_3332-3350_s | 3332-3350 | GUAAUUCUUUAUUGUGGCU | 959 | AGCCACAAUAAAGAAUUAC | 1528 |
| NM_001735.2_3342-3360_s | 3342-3360 | AUUGUGGCUAGUUGAGAAU | 960 | AUUCUCAACUAGCCACAAU | 1529 |
| NM_001735.2_3349-3367_s | 3349-3367 | CUAGUUGAGAAUUAUCAAU | 961 | AUUGAUAAUUCUCAACUAG | 1530 |
| NM_001735.2_3360-3378_s | 3360-3378 | UUAUCAAUUAGAUAAUGGA | 962 | UCCAUUAUCUAAUUGAUAA | 1531 |
| NM_001735.2_3373-3391_s | 3373-3391 | AAUGGAUCUUUCAAGGAAA | 963 | UUUCCUUGAAAGAUCCAUU | 1532 |
| NM_001735.2_3380-3398_s | 3380-3398 | CUUUCAAGGAAAAUUCACA | 964 | UGUGAAUUUUCCUUGAAAG | 1533 |
| NM_001735.2_3391-3409_s | 3391-3409 | AAUUCACAGUAUCAACCAA | 965 | UUGGUUGAUACUGUGAAUU | 1534 |
| NM_001735.2_3399-3417_s | 3399-3417 | GUAUCAACCAAUAAAAUUA | 966 | UAAUUUUAUUGGUUGAUAC | 1535 |
| NM_001735.2_3411-3429_s | 3411-3429 | AAAAUUACAGGGUACCUUG | 967 | CAAGGUACCCUGUAAUUUU | 1536 |
| NM_001735.2_3419-3437_s | 3419-3437 | AGGGUACCUUGCCUGUUGA | 968 | UCAACAGGCAAGGUACCCU | 1537 |
| NM_001735.2 j433-3451_s | 3433-3451 | GUUGAAGCCCGAGAGAACA | 969 | UGUUCUCUCGGGCUUCAAC | 1538 |
| NM_001735.2_3441-3459_s | 3441-3559 | CCGAGAGAACAGCUUAUAU | 970 | AUAUAAGCUGUUCUCUCGG | 1539 |
| NM_001735.2_3452-3470_s | 3452-3470 | GCUUAUAUCUUACAGCCUU | 971 | AAGGCUGUAAGAUAUAAGC | 1540 |
| NM_001735.2_3460-3478_s | 3460-3478 | CUUACAGCCUUUACUGUGA | 972 | UCACAGUAAAGGCUGUAAG | 1541 |
| NM_001735.2_3482-3500_s | 3482-3500 | GAAUUAGAAAGGCUUUCGA | 973 | UCGAAAGCCUUUCUAAUUC | 1542 |
| NM_001735.2_3492-3510_s | 3492-3510 | GGCUUUCGAUAUAUGCCCC | 974 | GGGGCAUAUAUCGAAAGCC | 1543 |
| NM_001735.2_3499-3517_s | 3499-3517 | GAUAUAUGCCCCCUGGUGA | 975 | UCACCAGGGGGCAUAUAUC | 1544 |
| NM_001735.2_3513-3531_s | 3513-3531 | GGUGAAAAUCGACACAGCU | 976 | AGCUGUGUCGAUUUUCACC | 1545 |
| NM_001735.2_3522-3540_s | 3522-3540 | CGACACAGCUCUAAUUAAA | 977 | UUUAAUUAGAGCUGUGUCG | 1546 |
| NM_001735.2_3529-3547_s | 3529-3547 | GCUCUAAUUAAAGCUGACA | 978 | UGUCAGCUUUAAUUAGAGC | 1547 |
| NM_001735.2_3542-3560_s | 3542-3560 | CUGACAACUUUCUGCUUGA | 979 | UCAAGCAGAAAGUUGUCAG | 1548 |
| NM_001735.2_3549-3567_s | 3549-3567 | CUUUCUGCUUGAAAAUACA | 980 | UGUAUUUUCAAGCAGAAAG | 1549 |
| NM_001735.2_3560-3578_s | 3560-3578 | AAAAUACACUGCCAGCCCA | 981 | UGGGCUGGCAGUGUAUUUU | 1550 |
| NM_001735.2_3573-3591_s | 3573-3591 | AGCCCAGAGCACCUUUACA | 982 | UGUAAAGGUGCUCUGGGCU | 1551 |
| NM_001735.2_3581-3599_s | 3581-3599 | GCACCUUUACAUUGGCCAU | 983 | AUGGCCAAUGUAAAGGUGC | 1552 |
| NM_001735.2_3589-3607_s | 3589-3607 | ACAUUGGCCAUUUCUGCGU | 984 | ACGCAGAAAUGGCCAAUGU | 1553 |
| NM_001735.2_3602-3620_s | 3602-3620 | CUGCGUAUGCUCUUUCCCU | 985 | AGGGAAAGAGCAUACGCAG | 1554 |
| NM_001735.2_3613-3631_s | 3613-3631 | CUUUCCCUGGGAGAUAAAA | 986 | UUUUAUCUCCCAGGGAAAG | 1555 |
| NM_001735.2_3623-3641_s | 3623-3641 | GAGAUAAAACUCACCCACA | 987 | UGUGGGUGAGUUUUAUCUC | 1556 |
| NM_001735.2_3631-3649_s | 3631-3649 | ACUCACCCACAGUUUCGUU | 988 | AACGAAACUGUGGGUGAGU | 1557 |
| NM_001735.2_3640-3658_s | 3640-3658 | CAGUUUCGUUCAAUUGUUU | 989 | AAACAAUUGAACGAAACUG | 1558 |
| NM_001735.2_3650-3668_s | 3650-3668 | CAAUUGUUUCAGCUUUGAA | 990 | UUCAAAGCUGAAACAAUUG | 1559 |
| NM_001735.2_3662-3680_s | 3662-3680 | CUUUGAAGAGAGAAGCUUU | 991 | AAAGCUUCUCUCUUCAAAG | 1560 |
| NM_001735.2_3669-3687_s | 3669-3687 | GAGAGAAGCUUUGGUUAAA | 992 | UUUAACCAAAGCUUCUCUC | 1561 |
| NM_001735.2_3682-3700_s | 3682-3700 | GUUAAAGGUAAUCCACCCA | 993 | UGGGUGGAUUACCUUUAAC | 1562 |
| NM_001735.2_3691-3709_s | 3691-3709 | AAUCCACCCAUUUAUCGUU | 994 | AACGAUAAAUGGGUGGAUU | 1563 |
| NM_001735.2_3699-3717_s | 3699-3717 | CAUUUAUCGUUUUUGGAAA | 995 | UUUCCAAAAACGAUAAAUG | 1564 |
| NM_001735.2_3710-3728_s | 3710-3728 | UUUGGAAAGACAAUCUUCA | 996 | UGAAGAUUGUCUUUCCAAA | 1565 |
| NM_001735.2_3721-3739_s | 3721-3739 | AAUCUUCAGCAUAAAGACA | 997 | UGUCUUUAUGCUGAAGAUU | 1566 |
| NM_001735.2_3730-3748_s | 3730-3748 | CAUAAAGACAGCUCUGUAC | 998 | GUACAGAGCUGUCUUUAUG | 1567 |
| NM_001735.2_3741-3759_s | 3741-3759 | CUCUGUACCUAACACUGGU | 999 | ACCAGUGUUAGGUACAGAG | 1568 |
| NM_001735.2_3752-3770_s | 3752-3770 | ACACUGGUACGGCACGUAU | 1000 | AUACGUGCCGUACCAGUGU | 1569 |
| NM_001735.2_3762-3780_s | 3762-3780 | GGCACGUAUGGUAGAAACA | 1001 | UGUUUCUACCAUACGUGCC | 1570 |
| NM_001735.2_3771-3789_s | 3771-3789 | GGUAGAAACAACUGCCUAU | 1002 | AUAGGCAGUUGUUUCUACC | 1571 |
| NM_001735.2_3779-3797_s | 3779-3797 | CAACUGCCUAUGCUUUACU | 1003 | AGUAAAGCAUAGGCAGUUG | 1572 |
| NM_001735.2_3791-3809_s | 3791-3809 | CUUUACUCACCAGUCUGAA | 1004 | UUCAGACUGGUGAGUAAAG | 1573 |
| NM_001735.2_3803-3821_s | 3803-3821 | GUCUGAACUUGAAAGAUAU | 1005 | AUAUCUUUCAAGUUCAGAC | 1574 |
| NM_001735.2_3809-3827_s | 3809-3827 | ACUUGAAAGAUAUAAAUUA | 1006 | UAAUUUAUAUCUUUCAAGU | 1575 |
| NM_001735.2_3819-3837_s | 3819-3837 | UAUAAAUUAUGUUAACCCA | 1007 | UGGGUUAACAUAAUUUAUA | 1576 |
| NM_001735.2_3829-3847_s | 3829-3847 | GUUAACCCAGUCAUCAAAU | 1008 | AUUUGAUGACUGGGUUAAC | 1577 |
| NM_001735.2_3839-3857_s | 3839-3857 | UCAUCAAAUGGCUAUCAGA | 1009 | UCUGAUAGCCAUUUGAUGA | 1578 |
| NM_001735.2_3851-3869_s | 3851-3869 | UAUCAGAAGAGCAGAGGUA | 1010 | UACCUCUGCUCUUCUGAUA | 1579 |
| NM_001735.2_3863-3881_s | 3863-3881 | AGAGGUAUGGAGGUGGCUU | 1011 | AAGCCACCUCCAUACCUCU | 1580 |
| NM_001735.2_3872-3890_s | 3872-3890 | GAGGUGGCUUUUAUUCAAC | 1012 | GUUGAAUAAAAGCCACCUC | 1581 |
| NM_001735.2_3883-3901_s | 3883-3901 | UAUUCAACCCAGGACACAA | 1013 | UUGUGUCCUGGGUUGAAUA | 1582 |
| NM_001735.2_3893-3911_s | 3893-3911 | AGGACACAAUCAAUGCCAU | 1014 | AUGGCAUUGAUUGUGUCCU | 1583 |
| NM_001735.2_3899-3917_s | 3899-3917 | CAAUCAAUGCCAUUGAGGG | 1015 | CCCUCAAUGGCAUUGAUUG | 1584 |
| NM_001735.2_3909-3927_s | 3909-3927 | CAUUGAGGGCCUGACGGAA | 1016 | UUCCGUCAGGCCCUCAAUG | 1585 |
| NM_001735.2_3922-3940_s | 3922-3940 | ACGGAAUAUUCACUCCUGG | 1017 | CCAGGAGUGAAUAUUCCGU | 1586 |
| NM_001735.2_3930-3948_s | 3930-3948 | UUCACUCCUGGUUAAACAA | 1018 | UUGUUUAACCAGGAGUGAA | 1587 |
| NM_001735.2_3939-3957_s | 3939-3957 | GGUUAAACAACUCCGCUUG | 1019 | CAAGCGGAGUUGUUUAACC | 1588 |
| NM_001735.2_3951-3969_s | 3951-3969 | CCGCUUGAGUAUGGACAUC | 1020 | GAUGUCCAUACUCAAGCGG | 1589 |
| NM_001735.2_3963-3981_s | 3963-3981 | GGACAUCGAUGUUUCUUAC | 1021 | GUAAGAAACAUCGAUGUCC | 1590 |
| NM_001735.2_3969-3987_s | 3969-3987 | CGAUGUUUCUUACAAGCAU | 1022 | AUGCUUGUAAGAAACAUCG | 1591 |
| NM_001735.2_3981-3999_s | 3981-3999 | CAAGCAUAAAGGUGCCUUA | 1023 | UAAGGCACCUUUAUGCUUG | 1592 |
| NM_001735.2_3992-4010_s | 3992-4010 | GUGCCUUACAUAAUUAUAA | 1024 | UUAUAAUUAUGUAAGGCAC | 1593 |
| NM_001735.2_3999-4017_s | 3999-4017 | ACAUAAUUAUAAAAUGACA | 1025 | UGUCAUUUUAUAAUUAUGU | 1594 |
| NM_001735.2_4009-4027_s | 4009-4027 | AAAAUGACAGACAAGAAUU | 1026 | AAUUCUUGUCUGUCAUUUU | 1595 |
| NM_001735.2_4020-4038_s | 4020-4038 | CAAGAAUUUCCUUGGGAGG | 1027 | CCUCCCAAGGAAAUUCUUG | 1596 |
| NM_001735.2_4029-4047_s | 4029-4047 | CCUUGGGAGGCCAGUAGAG | 1028 | CUCUACUGGCCUCCCAAGG | 1597 |
| NM_001735.2_4041-4059_s | 4041-4059 | AGUAGAGGUGCUUCUCAAU | 1029 | AUUGAGAAGCACCUCUACU | 1598 |
| NM_001735.2_4051-4069_s | 4051-4069 | CUUCUCAAUGAUGACCUCA | 1030 | UGAGGUCAUCAUUGAGAAG | 1599 |
| NM_001735.2_4062-4080_s | 4062-4080 | UGACCUCAUUGUCAGUACA | 1031 | UGUACUGACAAUGAGGUCA | 1600 |
| NM_001735.2_4072-4090_s | 4072-4090 | GUCAGUACAGGAUUUGGCA | 1032 | UGCCAAAUCCUGUACUGAC | 1601 |
| NM_001735.2_4080-4098_s | 4080-4098 | AGGAUUUGGCAGUGGCUUG | 1033 | CAAGCCACUGCCAAAUCCU | 1602 |
| NM_001735.2_4092-4110_s | 4092-4110 | UGGCUUGGCUACAGUACAU | 1034 | AUGUACUGUAGCCAAGCCA | 1603 |
| NM_001735.2_4099-4117_s | 4099-4117 | GCUACAGUACAUGUAACAA | 1035 | UUGUUACAUGUACUGUAGC | 1604 |
| NM_001735.2_4113-4131_s | 4113-4131 | AACAACUGUAGUUCACAAA | 1036 | UUUGUGAACUACAGUUGUU | 1605 |
| NM_001735.2_4120-4138_s | 4120-4138 | GUAGUUCACAAAACCAGUA | 1037 | UACUGGUUUUGUGAACUAC | 1606 |
| NM_001735.2_4130-4148_s | 4130-4148 | AAACCAGUACCUCUGAGGA | 1038 | UCCUCAGAGGUACUGGUUU | 1607 |
| NM_001735.2_4143-4161_s | 4143-4161 | UGAGGAAGUUUGCAGCUUU | 1039 | AAAGCUGCAAACUUCCUCA | 1608 |
| NM_001735.2_4153-4171_s | 4153-4171 | UGCAGCUUUUAUUUGAAAA | 1040 | UUUUCAAAUAAAAGCUGCA | 1609 |
| NM_001735.2_4163-4181_s | 4163-4181 | AUUUGAAAAUCGAUACUCA | 1041 | UGAGUAUCGAUUUUCAAAU | 1610 |
| NM_001735.2_4173-4191_s | 4173-4191 | CGAUACUCAGGAUAUUGAA | 1042 | UUCAAUAUCCUGAGUAUCG | 1611 |
| NM_001735.2_4182-4200_s | 4182-4200 | GGAUAUUGAAGCAUCCCAC | 1043 | GUGGGAUGCUUCAAUAUCC | 1612 |
| NM_001735.2_4189-4207_s | 4189-4207 | GAAGCAUCCCACUACAGAG | 1044 | CUCUGUAGUGGGAUGCUUC | 1613 |
| NM_001735.2_4199-4217_s | 4199-4217 | ACUACAGAGGCUACGGAAA | 1045 | UUUCCGUAGCCUCUGUAGU | 1614 |
| NM_001735.2_4212-4230_s | 4212-4230 | CGGAAACUCUGAUUACAAA | 1046 | UUUGUAAUCAGAGUUUCCG | 1615 |
| NM_001735.2_4221-4239_s | 4221-4239 | UGAUUACAAACGCAUAGUA | 1047 | UACUAUGCGUUUGUAAUCA | 1616 |
| NM_001735.2_4232-4250_s | 4232-4250 | GCAUAGUAGCAUGUGCCAG | 1048 | CUGGCACAUGCUACUAUGC | 1617 |
| NM_001735.2_4240-4258_s | 4240-4258 | GCAUGUGCCAGCUACAAGC | 1049 | GCUUGUAGCUGGCACAUGC | 1618 |
| NM_001735.2_4251-4269_s | 4251-4269 | CUACAAGCCCAGCAGGGAA | 1050 | UUCCCUGCUGGGCUUGUAG | 1619 |
| NM_001735.2_4260-4278_s | 4260-4278 | CAGCAGGGAAGAAUCAUCA | 1051 | UGAUGAUUCUUCCCUGCUG | 1620 |
| NM_001735.2_4270-4288_s | 4270-4288 | GAAUCAUCAUCUGGAUCCU | 1052 | AGGAUCCAGAUGAUGAUUC | 1621 |
| NM_001735.2_4283-4301_s | 4283-4301 | GAUCCUCUCAUGCGGUGAU | 1053 | AUCACCGCAUGAGAGGAUC | 1622 |
| NM_001735.2_4289-4307_s | 4289-4307 | CUCAUGCGGUGAUGGACAU | 1054 | AUGUCCAUCACCGCAUGAG | 1623 |
| NM_001735.2_4299-4317_s | 4299-4317 | GAUGGACAUCUCCUUGCCU | 1055 | AGGCAAGGAGAUGUCCAUC | 1624 |
| NM_001735.2_4311-4329_s | 4311-4329 | CUUGCCUACUGGAAUCAGU | 1056 | ACUGAUUCCAGUAGGCAAG | 1625 |
| NM_001735.2_4322-4340_s | 4322-4340 | GAAUCAGUGCAAAUGAAGA | 1057 | UCUUCAUUUGCACUGAUUC | 1626 |
| NM_001735.2_4332-4350_s | 4332-4350 | AAAUGAAGAAGACUUAAAA | 1058 | UUUUAAGUCUUCUUCAUUU | 1627 |
| NM_001735.2_4339-4357_s | 4339-4357 | GAAGACUUAAAAGCCCUUG | 1059 | CAAGGGCUUUUAAGUCUUC | 1628 |
| NM_001735.2_4353-4371_s | 4353-4371 | CCUUGUGGAAGGGGUGGAU | 1060 | AUCCACCCCUUCCACAAGG | 1629 |
| NM_001735.2_4360-4378_s | 4360-4378 | GAAGGGGUGGAUCAACUAU | 1061 | AUAGUUGAUCCACCCCUUC | 1630 |
| NM_001735.2_4370-4388_s | 4370-4388 | AUCAACUAUUCACUGAUUA | 1062 | UAAUCAGUGAAUAGUUGAU | 1631 |
| NM_001735.2_4380-4398_s | 4380-4398 | CACUGAUUACCAAAUCAAA | 1063 | UUUGAUUUGGUAAUCAGUG | 1632 |
| NM_001735.2_4393-4411_s | 4393-4411 | AUCAAAGAUGGACAUGUUA | 1064 | UAACAUGUCCAUCUUUGAU | 1633 |
| NM_001735.2_4402-4420_s | 4402-4420 | GGACAUGUUAUUCUGCAAC | 1065 | GUUGCAGAAUAACAUGUCC | 1634 |
| NM_001735.2_4413-4431_s | 4413-4431 | UCUGCAACUGAAUUCGAUU | 1066 | AAUCGAAUUCAGUUGCAGA | 1635 |
| NM_001735.2_4422-4440_s | 4422-4440 | GAAUUCGAUUCCCUCCAGU | 1067 | ACUGGAGGGAAUCGAAUUC | 1636 |
| NM_001735.2_4432-4450_s | 4432-4450 | CCCUCCAGUGAUUUCCUUU | 1068 | AAAGGAAAUCACUGGAGGG | 1637 |
| NM_001735.2_4441-4459_s | 4441-4459 | GAUUUCCUUUGUGUACGAU | 1069 | AUCGUACACAAAGGAAAUC | 1638 |
| NM_001735.2_4453-4471_s | 4453-4471 | GUACGAUUCCGGAUAUUUG | 1070 | CAAAUAUCCGGAAUCGUAC | 1639 |
| NM_001735.2_4462-4480_s | 4462-4480 | CGGAUAUUUGAACUCUUUG | 1071 | CAAAGAGUUCAAAUAUCCG | 1640 |
| NM_001735.2_4473-4491_s | 4473-4491 | ACUCUUUGAAGUUGGGUUU | 1072 | AAACCCAACUUCAAAGAGU | 1641 |
| NM_001735.2_4482-4500_s | 4482-4500 | AGUUGGGUUUCUCAGUCCU | 1073 | AGGACUGAGAAACCCAACU | 1642 |
| NM_001735.2_4490-4508_s | 4490-4508 | UUCUCAGUCCUGCCACUUU | 1074 | AAAGUGGCAGGACUGAGAA | 1643 |
| NM_001735.2_4503-4521_s | 4503-4521 | CACUUUCACAGUGUACGAA | 1075 | UUCGUACACUGUGAAAGUG | 1644 |
| NM_001735.2_4509-4527_s | 4509-4527 | CACAGUGUACGAAUACCAC | 1076 | GUGGUAUUCGUACACUGUG | 1645 |
| NM_001735.2_4523-4541_s | 4523-4541 | ACCACAGACCAGAUAAACA | 1077 | UGUUUAUCUGGUCUGUGGU | 1646 |
| NM_001735.2_4531-4549_s | 4531-4549 | CCAGAUAAACAGUGUACCA | 1078 | UGGUACACUGUUUAUCUGG | 1647 |
| NM_001735.2_4540-4558_s | 4540-4558 | CAGUGUACCAUGUUUUAUA | 1079 | UAUAAAACAUGGUACACUG | 1648 |
| NM_001735.2_4551-4569_s | 4551-4569 | GUUUUAUAGCACUUCCAAU | 1080 | AUUGGAAGUGCUAUAAAAC | 1649 |
| NM_001735.2_4562-4580_s | 4562-4580 | CUUCCAAUAUCAAAAUUCA | 1081 | UGAAUUUUGAUAUUGGAAG | 1650 |
| NM_001735.2_4570-4588_s | 4570-4588 | AUCAAAAUUCAGAAAGUCU | 1082 | AGACUUUCUGAAUUUUGAU | 1651 |
| NM_001735.2_4581-4599_s | 4581-4599 | GAAAGUCUGUGAAGGAGCC | 1083 | GGCUCCUUCACAGACUUUC | 1652 |
| NM_001735.2_4591-4609_s | 4591-4609 | GAAGGAGCCGCGUGCAAGU | 1084 | ACUUGCACGCGGCUCCUUC | 1653 |
| NM_001735.2_4601-4619_s | 4601-4619 | CGUGCAAGUGUGUAGAAGC | 1085 | GCUUCUACACACUUGCACG | 1654 |
| NM_001735.2_4612-4630_s | 4612-4630 | GUAGAAGCUGAUUGUGGGC | 1086 | GCCCACAAUCAGCUUCUAC | 1655 |
| NM_001735.2_4619-4637_s | 4619-4637 | CUGAUUGUGGGCAAAUGCA | 1087 | UGCAUUUGCCCACAAUCAG | 1656 |
| NM_001735.2_4629-4647_s | 4629-4647 | GCAAAUGCAGGAAGAAUUG | 1088 | CAAUUCUUCCUGCAUUUGC | 1657 |
| NM_001735.2_4639-4657_s | 4639-4657 | GAAGAAUUGGAUCUGACAA | 1089 | UUGUCAGAUCCAAUUCUUC | 1658 |
| NM_001735.2_4651-4669_s | 4651-4669 | CUGACAAUCUCUGCAGAGA | 1090 | UCUCUGCAGAGAUUGUCAG | 1659 |
| NM_001735.2_4663-4681_s | 4663-4681 | GCAGAGACAAGAAAACAAA | 1091 | UUUGUUUUCUUGUCUCUGC | 1660 |
| NM_001735.2_4670-4688_s | 4670-4688 | CAAGAAAACAAACAGCAUG | 1092 | CAUGCUGUUUGUUUUCUUG | 1661 |
| NM_001735.2_4681-4699_s | 4681-4699 | ACAGCAUGUAAACCAGAGA | 1093 | UCUCUGGUUUACAUGCUGU | 1662 |
| NM_001735.2_4693-4711_s | 4693-4711 | CCAGAGAUUGCAUAUGCUU | 1094 | AAGCAUAUGCAAUCUCUGG | 1663 |
| NM_001735.2_4702-4720_s | 4702-4720 | GCAUAUGCUUAUAAAGUUA | 1095 | UAACUUUAUAAGCAUAUGC | 1664 |
| NM_001735.2_4710-4728_s | 4710-4728 | UUAUAAAGUUAGCAUCACA | 1096 | UGUGAUGCUAACUUUAUAA | 1665 |
| NM_001735.2_4722-4740_s | 4722-4740 | CAUCACAUCCAUCACUGUA | 1097 | UACAGUGAUGGAUGUGAUG | 1666 |
| NM_001735.2_4733-4751_s | 4733-4751 | UCACUGUAGAAAAUGUUUU | 1098 | AAAACAUUUUCUACAGUGA | 1667 |
| NM_001735.2_4740-4758_s | 4740-4758 | AGAAAAUGUUUUUGUCAAG | 1099 | CUUGACAAAAACAUUUUCU | 1668 |
| NM_001735.2_4750-4768_s | 4750-4768 | UUUGUCAAGUACAAGGCAA | 1100 | UUGCCUUGUACUUGACAAA | 1669 |
| NM_001735.2_4763-4781_s | 4763-4781 | AGGCAACCCUUCUGGAUAU | 1101 | AUAUCCAGAAGGGUUGCCU | 1670 |
| NM_001735.2_4770-4788_s | 4770-4788 | CCUUCUGGAUAUCUACAAA | 1102 | UUUGUAGAUAUCCAGAAGG | 1671 |
| NM_001735.2_4779-4797_s | 4779-4797 | UAUCUACAAAACUGGGGAA | 1103 | UUCCCCAGUUUUGUAGAUA | 1672 |
| NM_001735.2_4790-4808_s | 4790-4808 | CUGGGGAAGCUGUUGCUGA | 1104 | UCAGCAACAGCUUCCCCAG | 1673 |
| NM_001735.2_4799-4817_s | 4799-4817 | CUGUUGCUGAGAAAGACUC | 1105 | GAGUCUUUCUCAGCAACAG | 1674 |
| NM_001735.2_4813-4831_s | 4813-4831 | GACUCUGAGAUUACCUUCA | 1106 | UGAAGGUAAUCUCAGAGUC | 1675 |
| NM_001735.2_4819-4837_s | 4819-4837 | GAGAUUACCUUCAUUAAAA | 1107 | UUUUAAUGAAGGUAAUCUC | 1676 |
| NM_001735.2_4831-4849_s | 4831-4849 | AUUAAAAAGGUAACCUGUA | 1108 | UACAGGUUACCUUUUUAAU | 1677 |
| NM_001735.2_4841-4859_s | 4841-4859 | UAACCUGUACUAACGCUGA | 1109 | UCAGCGUUAGUACAGGUUA | 1678 |
| NM_001735.2_4850-4868_s | 4850-4868 | CUAACGCUGAGCUGGUAAA | 1110 | UUUACCAGCUCAGCGUUAG | 1679 |
| NM_001735.2_4863-4881_s | 4863-4881 | GGUAAAAGGAAGACAGUAC | 1111 | GUACUGUCUUCCUUUUACC | 1680 |
| NM_001735.2_4871-4889_s | 4871-4889 | GAAGACAGUACUUAAUUAU | 1112 | AUAAUUAAGUACUGUCUUC | 1681 |
| NM_001735.2_4881-4899_s | 4881-4899 | CUUAAUUAUGGGUAAAGAA | 1113 | UUCUUUACCCAUAAUUAAG | 1682 |
| NM_001735.2_4893-4911_s | 4893-4911 | UAAAGAAGCCCUCCAGAUA | 1114 | UAUCUGGAGGGCUUCUUUA | 1683 |
| NM_001735.2_4902-4920_s | 4902-4920 | CCUCCAGAUAAAAUACAAU | 1115 | AUUGUAUUUUAUCUGGAGG | 1684 |
| NM_001735.2_4912-4930_s | 4912-4930 | AAAUACAAUUUCAGUUUCA | 1116 | UGAAACUGAAAUUGUAUUU | 1685 |
| NM_001735.2_4923-4941_s | 4923-4941 | CAGUUUCAGGUACAUCUAC | 1117 | GUAGAUGUACCUGAAACUG | 1686 |
| NM_001735.2_4931-4949_s | 4931-4949 | GGUACAUCUACCCUUUAGA | 1118 | UCUAAAGGGUAGAUGUACC | 1687 |
| NM_001735.2_4942-4960_s | 4942-4960 | CCUUUAGAUUCCUUGACCU | 1119 | AGGUCAAGGAAUCUAAAGG | 1688 |
| NM_001735.2_4952-4970_s | 4952-4970 | CCUUGACCUGGAUUGAAUA | 1120 | UAUUCAAUCCAGGUCAAGG | 1689 |
| NM_001735.2_4961-4979_s | 4961-4979 | GGAUUGAAUACUGGCCUAG | 1121 | CUAGGCCAGUAUUCAAUCC | 1690 |
| NM_001735.2_4971-4989_s | 4971-4989 | CUGGCCUAGAGACACAACA | 1122 | UGUUGUGUCUCUAGGCCAG | 1691 |
| NM_001735.2_4979-4997_s | 4979-4997 | GAGACACAACAUGUUCAUC | 1123 | GAUGAACAUGUUGUGUCUC | 1692 |
| NM_001735.2_4991-5009_s | 4991-5009 | GUUCAUCGUGUCAAGCAUU | 1124 | AAUGCUUGACACGAUGAAC | 1693 |
| NM_001735.2_5000-5018_s | 5000-5018 | GUCAAGCAUUUUUAGCUAA | 1125 | UUAGCUAAAAAUGCUUGAC | 1694 |
| NM_001735.2_5013-5031_s | 5013-5031 | AGCUAAUUUAGAUGAAUUU | 1126 | AAAUUCAUCUAAAUUAGCU | 1695 |
| NM_001735.2_5022-5040_s | 5022-5040 | AGAUGAAUUUGCCGAAGAU | 1127 | AUCUUCGGCAAAUUCAUCU | 1696 |
| NM_001735.2_5033-5051_s | 5033-5051 | CCGAAGAUAUCUUUUUAAA | 1128 | UUUAAAAAGAUAUCUUCGG | 1697 |
| NM_001735.2_5043-5061_s | 5043-5061 | CUUUUUAAAUGGAUGCUAA | 1129 | UUAGCAUCCAUUUAAAAAG | 1698 |
| NM_001735.2_5053-5071_s | 5053-5071 | GGAUGCUAAAAUUCCUGAA | 1130 | UUCAGGAAUUUUAGCAUCC | 1699 |
| NM_001735.2_5059-5077_s | 5059-5077 | UAAAAUUCCUGAAGUUCAG | 1131 | CUGAACUUCAGGAAUUUUA | 1700 |
| NM_001735.2_5071-5089_s | 5071-5089 | AGUUCAGCUGCAUACAGUU | 1132 | AACUGUAUGCAGCUGAACU | 1701 |
| NM_001735.2_5080-5098_s | 5080-5098 | GCAUACAGUUUGCACUUAU | 1133 | AUAAGUGCAAACUGUAUGC | 1702 |
| NM_001735.2_5093-5111_s | 5093-5111 | ACUUAUGGACUCCUGUUGU | 1134 | ACAACAGGAGUCCAUAAGU | 1703 |
| NM_001735.2_5099-5117_s | 5099-5117 | GGACUCCUGUUGUUGAAGU | 1135 | ACUUCAACAACAGGAGUCC | 1704 |
| NM_001735.2_5109-5127_s | 5109-5127 | UGUUGAAGUUCGUUUUUUU | 1136 | AAAAAAACGAACUUCAACA | 1705 |
| NM_001735.2_5122-5140_s | 5122-5140 | UUUUUUGUUUUCUUCUUUU | 1137 | AAAAGAAGAAAACAAAAAA | 1706 |
| NM_001735.2_5132-5150_s | 5132-5150 | UCUUCUUUUUUUAAACAUU | 1138 | AAUGUUUAAAAAAAGAAGA | 1707 |
| NM_001735.2_5139-5157_s | 5139-5157 | UUUUUAAACAUUCAUAGCU | 1139 | AGCUAUGAAUGUUUAAAAA | 1708 |
| NM_001735.2_5152-5170_s | 5152-5170 | AUAGCUGGUCUUAUUUGUA | 1140 | UACAAAUAAGACCAGCUAU | 1709 |
| NM_001735.2_5159-5177_s | 5159-5177 | GUCUUAUUUGUAAAGCUCA | 1141 | UGAGCUUUACAAAUAAGAC | 1710 |
| NM_001735.2_5170-5188_s | 5170-5188 | AAAGCUCACUUUACUUAGA | 1142 | UCUAAGUAAAGUGAGCUUU | 1711 |
| NM_001735.2_5182-5200_s | 5182-5200 | ACUUAGAAUUAGUGGCACU | 1143 | AGUGCCACUAAUUCUAAGU | 1712 |
| NM_001735.2_5192-5210_s | 5192-5210 | AGUGGCACUUGCUUUUAUU | 1144 | AAUAAAAGCAAGUGCCACU | 1713 |
| NM_001735.2_5202-5220_s | 5202-5220 | GCUUUUAUUAGAGAAUGAU | 1145 | AUCAUUCUCUAAUAAAAGC | 1714 |
| NM_001735.2_5212-5230_s | 5212-5230 | GAGAAUGAUUUCAAAUGCU | 1146 | AGCAUUUGAAAUCAUUCUC | 1715 |
| NM_001735.2_5220-5238_s | 5220-5238 | UUUCAAAUGCUGUAACUUU | 1147 | AAAGUUACAGCAUUUGAAA | 1716 |
| NM_001735.2_5231-5249_s | 5231-5249 | GUAACUUUCUGAAAUAACA | 1148 | UGUUAUUUCAGAAAGUUAC | 1717 |
| NM_001735.2_5241-5259_s | 5241-5259 | GAAAUAACAUGGCCUUGGA | 1149 | UCCAAGGCCAUGUUAUUUC | 1718 |
| NM_001735.2_5253-5271_s | 5253-5271 | CCUUGGAGGGCAUGAAGAC | 1150 | GUCUUCAUGCCCUCCAAGG | 1719 |
| NM_001735.2_5259-5277_s | 5259-5277 | AGGGCAUGAAGACAGAUAC | 1151 | GUAUCUGUCUUCAUGCCCU | 1720 |
| NM_001735.2_5273-5291_s | 5273-5291 | GAUACUCCUCCAAGGUUAU | 1152 | AUAACCUUGGAGGAGUAUC | 1721 |
| NM_001735.2_5279-5297_s | 5279-5297 | CCUCCAAGGUUAUUGGACA | 1153 | UGUCCAAUAACCUUGGAGG | 1722 |
| NM_001735.2_5293-5311_s | 5293-5311 | GGACACCGGAAACAAUAAA | 1154 | UUUAUUGUUUCCGGUGUCC | 1723 |
| NM_001735.2_5301-5319_s | 5301-5319 | GAAACAAUAAAUUGGAACA | 1155 | UGUUCCAAUUUAUUGUUUC | 1724 |
| NM_001735.2_5311-5329_s | 5311-5329 | AUUGGAACACCUCCUCAAA | 1156 | UUUGAGGAGGUGUUCCAAU | 1725 |
| NM_001735.2_5322-5340_s | 5322-5340 | UCCUCAAACCUACCACUCA | 1157 | UGAGUGGUAGGUUUGAGGA | 1726 |
| NM_001735.2_5331-5349_s | 5331-5349 | CUACCACUCAGGAAUGUUU | 1158 | AAACAUUCCUGAGUGGUAG | 1727 |
| NM_001735.2_5343-5361_s | 5343-5361 | AAUGUUUGCUGGGGCCGAA | 1159 | UUCGGCCCCAGCAAACAUU | 1728 |
| NM_001735.2_5349-5367_s | 5349-5367 | UGCUGGGGCCGAAAGAACA | 1160 | UGUUCUUUCGGCCCCAGCA | 1729 |
| NM_001735.2_5360-5378_s | 5360-5378 | AAAGAACAGUCCAUUGAAA | 1161 | UUUCAAUGGACUGUUCUUU | 1730 |
| NM_001735.2_5371-5389_s | 5371-5389 | CAUUGAAAGGGAGUAUUAC | 1162 | GUAAUACUCCCUUUCAAUG | 1731 |
| NM_001735.2_5380-5398_s | 5380-5398 | GGAGUAUUACAAAAACAUG | 1163 | CAUGUUUUUGUAAUACUCC | 1732 |
| NM_001735.2_5391-5409_s | 5391-5409 | AAAACAUGGCCUUUGCUUG | 1164 | CAAGCAAAGGCCAUGUUUU | 1733 |
| NM_001735.2_5399-5417_s | 5399-5417 | GCCUUUGCUUGAAAGAAAA | 1165 | UUUUCUUUCAAGCAAAGGC | 1734 |
| NM_001735.2_5409-5427_s | 5409-5427 | GAAAGAAAAUACCAAGGAA | 1166 | UUCCUUGGUAUUUUCUUUC | 1735 |
| NM_001735.2_5420-5438_s | 5420-5438 | CCAAGGAACAGGAAACUGA | 1167 | UCAGUUUCCUGUUCCUUGG | 1736 |
| NM_001735.2_5433-5451_s | 5433-5451 | AACUGAUCAUUAAAGCCUG | 1168 | CAGGCUUUAAUGAUCAGUU | 1737 |
| NM_001735.2_5441-5459_s | 5441-5459 | AUUAAAGCCUGAGUUUGCU | 1169 | AGCAAACUCAGGCUUUAAU | 1738 |

### Example 5: In Vivo C5 Silencing

[0700] Groups of three female cynomolgus macaques were treated with C5-siRNA AD-58641 subcutaneously in the scapular and mid-dorsal areas of the back at 2.5 mg/kg or 5 mg/kg doses or a vehicle control. Two rounds of dosing were administered with eight doses in each round given every third day. Serum C5 was collected and evaluated using an ELISA assay specific for C5 detection (Abcam) at the indicated time points (FIG. 13). C5 levels were normalized to the average of three pre-dose samples. Samples collected prior to dosing, and on day 23 (24 hours after the last dose administered in the first round of treatment) were analyzed by complete serum chemistry, hematology and coagulation panels.

[0701] Analysis of serum C5 protein levels relative to pre-treatment serum C5 protein levels demonstrated that the 5 mg/kg AD-58641 dosing regimen reduced serum C5 protein levels up to 98% (FIG. 12). The average serum C5 levels were reduced by 97% at the nadir, indicating that the majority of circulating C5 is hepatic in origin. There was potent, dose-dependent and durable knock-down of serum C5 protein levels with subcutaneous administration of AD-58641. No changes in hematology, serum chemistry or coagulation parameters were identified 24 hours after the first round of dosing.

[0702] Serum hemolytic activity was also analyzed using a sensitized sheep erythrocyte assay to measure classical pathway activity. The percent hemolysis was calculated relative to maximal hemolysis and to background hemolysis in control samples. Mean hemolysis values +/− the SEM for three animals were calculated and analyzed (FIG. 13). Hemolysis was reduced up to 94% in the 5 mg/kg dosing regimen with an average inhibition of 92% at the nadir. The reduction in hemolysis was maintained for greater than two weeks following the last dose.

### Example 6: In Vitro Screening of Additional siRNAs

[0703] The C5 sense and antisense strand sequences shown in Table 20 were modified at the 3′-terminus with a short sequence of deoxy-thymine nucleotides (dT) (Table 21). The in vitro efficacy of duplexes comprising the sense and antisense sequences listed in Table 21 was determined using the following methods.

Cell Culture and Transfections Hep3B cells (ATCC, Manassas, VA) were grown to near confluence at 37° C. in an atmosphere of 5% CO₂ in EMEM (ATCC) supplemented with 10% FBS, before being released from the plate by trypsinization. Transfection was carried out by adding 5 μl of Opti-MEM plus 0.1 μl of Lipofectamine RNAiMax per well (Invitrogen, Carlsbad CA. cat #13778-150) to 5 μl of siRNA duplexes per well into a 384-well plate and incubated at room temperature for 15 minutes. 40 μl of complete growth media containing ˜5×103 Hep3B cells were then added to the siRNA mixture. Cells were incubated for 24 hours prior to RNA purification. Experiments were performed at 10 nM final duplex concentration.
Total RNA Isolation Using DYNABEADS mRNA Isolation Kit (Invitrogen, Part #: 610-12)

[0704] RNA isolation was performed using a semi-automated process of a Biotek EL 405 washer. Briefly, cells were lysed in 75 μl of Lysis/Binding Buffer containing 2 μl of Dynabeads, then mixed for 10 minutes on setting 7 of an electromagnetic shaker (Union Scientific). Magnetic beads were captured using magnetic stand and the supernatant was removed. After removing supernatant, magnetic beads were washed with 90 μl Wash Buffer A, followed by 90 μl of Wash buffer B. Beads were then washed twice with 100 μl of Elution buffer which was then aspirated and cDNA generated directly on bead bound RNA in the 384 well plate.

cDNA Synthesis Using ABI High Capacity cDNA Reverse Transcription Kit (Applied Biosystems, Foster City, CA, Cat #4368813)

[0705] A master mix of 2 μl 10× Buffer, 0.8 μl 25× dNTPs, 2 μl Random primers, 1 μl Reverse Transcriptase, 1 μl RNase inhibitor and 3.2 μl of H₂O per reaction were added directly to the bead bound RNA in the 384 well plates used for RNA isolation. Plates were then shaken on an electromagnetic shaker for 10 minutes and then placed in a 37° C. incubator for 2 hours. Following this incubation, plates were place on a shake in an 80° C. incubator for 7 minutes to inactivate the enzyme and elute the RNA/cDNA from the beads.

### Real Time PCR

[0706] 2 μl of cDNA were added to a master mix containing 0.5 μl GAPDH TaqMan Probe (Applied Biosystems Cat #4326317E), 0.5 μl C5 TaqMan probe (Applied Biosystems cat #Hs00156197_M1) and 5 μl Lightcycler 480 probe master mix (Roche Cat #04887301001) per well in a 384 well plates (Roche cat #04887301001). Real time PCR was done in a Roche LC480 Real Time PCR system (Roche). Each duplex was tested in in at least two independent transfections and each transfection was assayed in duplicate.

[0707] To calculate relative fold change, real time data were analyzed using the ΔΔCt method and normalized to assays performed with cells transfected with 10 nM AD-1955, or mock transfected cells.

[0708] Table 22 shows the results of a single dose screen in Hep3B cells transfected with the indicated dT modified iRNAs. Data are expressed as percent of message remaining relative to untreated cells.

TABLE 21
dT Modified C5 iRNAs

| | | SEQ ID | Position in | | SEQ ID |
|---|---|---|---|---|---|
| Duplex ID | Sense Sequence | NO: | NM_001735.2 | Antisense Sequence | NO: |
| AD-61779.2 | UAUCCGUGGUUUCCUGCUAdTdT | 1739 | 3-21 | UAGCAGGAAACCACGGAUAdTdT | 2306 |
| AD-61785.2 | GGUUUCCUGCUACCUCCAAdTdT | 1740 | 10-28 | UUGGAGGUAGCAGGAAACCdTdT | 2307 |
| AD-61791.2 | CCUCCAACCAUGGGCCUUUdTdT | 1741 | 22-40 | AAAGGCCCAUGGUUGGAGGdTdT | 2308 |
| AD-61797.2 | GGGCCUUUUGGGAAUACUUdTdT | 1742 | 33-51 | AAGUAUUCCCAAAAGGCCCdTdT | 2309 |
| AD-61803.2 | GGAAUACUUUGUUUUUUAAdTdT | 1743 | 43-61 | UUAAAAAACAAAGUAUUCCdTdT | 2310 |
| AD-61809.2 | CUUUGUUUUUUAAUCUUCCdTdT | 1744 | 49-67 | GGAAGAUUAAAAAACAAAGdTdT | 2311 |
| AD-61815.2 | CUUCCUGGGGAAAACCUGGdTdT | 1745 | 63-81 | CCAGGUUUUCCCCAGGAAGdTdT | 2312 |
| AD-61821.2 | GGAAAACCUGGGGACAGGAdTdT | 1746 | 71-89 | UCCUGUCCCCAGGUUUUCCdTdT | 2313 |
| AD-61780.2 | GGGACAGGAGCAAACAUAUdTdT | 1747 | 81-99 | AUAUGUUUGCUCCUGUCCCdTdT | 2314 |
| AD-61786.2 | CAAACAUAUGUCAUUUCAGdTdT | 1748 | 91-109 | CUGAAAUGACAUAUGUUUGdTdT | 2315 |
| AD-61792.2 | CAUUUCAGCACCAAAAAUAdTdT | 1749 | 102-120 | UAUUUUUGGUGCUGAAAUGdTdT | 2316 |
| AD-61798.2 | GCACCAAAAAUAUUCCGUGdTdT | 1750 | 109-127 | CACGGAAUAUUUUUGGUGCdTdT | 2317 |
| AD-61804.2 | CCGUGUUGGAGCAUCUGAAdTdT | 1751 | 123-141 | UUCAGAUGCUCCAACACGGdTdT | 2318 |
| AD-61810.2 | GGAGCAUCUGAAAAUAUUGdTdT | 1752 | 130-148 | CAAUAUUUUCAGAUGCUCCdTdT | 2319 |
| AD-61816.2 | GAAAAUAUUGUGAUUCAAGdTdT | 1753 | 139-157 | CUUGAAUCACAAUAUUUUCdTdT | 2320 |
| AD-61822.2 | GAUUCAAGUUUAUGGAUACdTdT | 1754 | 150-168 | GUAUCCAUAAACUUGAAUCdTdT | 2321 |
| AD-61781.2 | GGAUACACUGAAGCAUUUGdTdT | 1755 | 163-181 | CAAAUGCUUCAGUGUAUCCdTdT | 2322 |
| AD-61787.2 | GAAGCAUUUGAUGCAACAAdTdT | 1756 | 172-190 | UUGUUGCAUCAAAUGCUUCdTdT | 2323 |
| AD-61793.2 | UGCAACAAUCUCUAUUAAAdTdT | 1757 | 183-201 | UUUAAUAGAGAUUGUUGCAdTdT | 2324 |
| AD-61799.2 | AAUCUCUAUUAAAAGUUAUdTdT | 1758 | 189-207 | AUAACUUUUAAUAGAGAUUdTdT | 2325 |
| AD-61805.2 | AAGUUAUCCUGAUAAAAAAdTdT | 1759 | 201-219 | UUUUUUAUCAGGAUAACUUdTdT | 2326 |
| AD-61811.2 | CUGAUAAAAAAUUUAGUUAdTdT | 1760 | 209-227 | UAACUAAAUUUUUUAUCAGdTdT | 2327 |
| AD-61817.2 | UUAGUUACUCCUCAGGCCAdTdT | 1761 | 221-239 | UGGCCUGAGGAGUAACUAAdTdT | 2328 |
| AD-61823.2 | CCUCAGGCCAUGUUCAUUUdTdT | 1762 | 230-248 | AAAUGAACAUGGCCUGAGGdTdT | 2329 |
| AD-61782.2 | UUCAUUUAUCCUCAGAGAAdTdT | 1763 | 242-260 | UUCUCUGAGGAUAAAUGAAdTdT | 2330 |
| AD-61788.2 | CUCAGAGAAUAAAUUCCAAdTdT | 1764 | 252-270 | UUGGAAUUUAUUCUCUGAGdTdT | 2331 |
| AD-61794.2 | AAUAAAUUCCAAAACUCUGdTdT | 1765 | 259-277 | CAGAGUUUUGGAAUUUAUUdTdT | 2332 |
| AD-61800.2 | CUCUGCAAUCUUAACAAUAdTdT | 1766 | 273-291 | UAUUGUUAAGAUUGCAGAGdTdT | 2333 |
| AD-61806.2 | CUUAACAAUACAACCAAAAdTdT | 1767 | 282-300 | UUUUGGUUGUAUUGUUAAGdTdT | 2334 |
| AD-61812.2 | CAACCAAAACAAUUGCCUGdTdT | 1768 | 292-310 | CAGGCAAUUGUUUUGGUUGdTdT | 2335 |
| AD-61818.2 | CAAUUGCCUGGAGGACAAAdTdT | 1769 | 301-319 | UUUGUCCUCCAGGCAAUUGdTdT | 2336 |
| AD-61824.2 | GGACAAAACCCAGUUUCUUdTdT | 1770 | 313-331 | AAGAAACUGGGUUUUGUCCdTdT | 2337 |
| AD-61783.2 | CCAGUUUCUUAUGUGUAUUdTdT | 1771 | 322-340 | AAUACACAUAAGAAACUGGdTdT | 2338 |
| AD-61789.2 | AUGUGUAUUUGGAAGUUGUdTdT | 1772 | 332-350 | ACAACUUCCAAAUACACAUdTdT | 2339 |
| AD-61795.2 | GGAAGUUGUAUCAAAGCAUdTdT | 1773 | 342-360 | AUGCUUUGAUACAACUUCCdTdT | 2340 |
| AD-61801.2 | GUAUCAAAGCAUUUUUCAAdTdT | 1774 | 349-367 | UUGAAAAAUGCUUUGAUACdTdT | 2341 |
| AD-61807.2 | UUUUCAAAAUCAAAAAGAAdTdT | 1775 | 361-379 | UUCUUUUUGAUUUUGAAAAdTdT | 2342 |
| AD-61813.2 | CAAAAAGAAUGCCAAUAACdTdT | 1776 | 371-389 | GUUAUUGGCAUUCUUUUUGdTdT | 2343 |
| AD-61819.2 | GCCAAUAACCUAUGACAAUdTdT | 1777 | 381-399 | AUUGUCAUAGGUUAUUGGCdTdT | 2344 |
| AD-61825.2 | CCUAUGACAAUGGAUUUCUdTdT | 1778 | 389-407 | AGAAAUCCAUUGUCAUAGGdTdT | 2345 |
| AD-61784.2 | UGGAUUUCUCUUCAUUCAUdTdT | 1779 | 399-417 | AUGAAUGAAGAGAAAUCCAdTdT | 2346 |
| AD-61790.2 | CAUUCAUACAGACAAACCUdTdT | 1780 | 411-429 | AGGUUUGUCUGUAUGAAUGdTdT | 2347 |
| AD-61796.2 | CAGACAAACCUGUUUAUACdTdT | 1781 | 419-437 | GUAUAAACAGGUUUGUCUGdTdT | 2348 |
| AD-61802.2 | GUUUAUACUCCAGACCAGUdTdT | 1782 | 430-448 | ACUGGUCUGGAGUAUAAACdTdT | 2349 |
| AD-61808.2 | AGACCAGUCAGUAAAAGUUdTdT | 1783 | 441-459 | AACUUUUACUGACUGGUCUdTdT | 2350 |
| AD-61814.2 | AGUAAAAGUUAGAGUUUAUdTdT | 1784 | 450-468 | AUAAACUCUAACUUUUACUdTdT | 2351 |
| AD-61820.2 | AGAGUUUAUUCGUUGAAUGdTdT | 1785 | 460-478 | CAUUCAACGAAUAAACUCUdTdT | 2352 |
| AD-61826.2 | CGUUGAAUGACGACUUGAAdTdT | 1786 | 470-488 | UUCAAGUCGUCAUUCAACGdTdT | 2353 |
| AD-61832.2 | CUUGAAGCCAGCCAAAAGAdTdT | 1787 | 483-501 | UCUUUUGGCUGGCUUCAAGdTdT | 2354 |
| AD-61838.2 | CCAGCCAAAAGAGAAACUGdTdT | 1788 | 490-508 | CAGUUUCUCUUUUGGCUGGdTdT | 2355 |
| AD-61844.2 | AAACUGUCUUAACUUUCAUdTdT | 1789 | 503-521 | AUGAAAGUUAAGACAGUUUdTdT | 2356 |
| AD-61850.2 | AACUUUCAUAGAUCCUGAAdTdT | 1790 | 513-531 | UUCAGGAUCUAUGAAAGUUdTdT | 2357 |
| AD-61856.2 | CAUAGAUCCUGAAGGAUCAdTdT | 1791 | 519-537 | UGAUCCUUCAGGAUCUAUGdTdT | 2358 |
| AD-61862.2 | GAAGGAUCAGAAGUUGACAdTdT | 1792 | 529-547 | UGUCAACUUCUGAUCCUUCdTdT | 2359 |
| AD-61868.2 | UGACAUGGUAGAAGAAAUUdTdT | 1793 | 543-561 | AAUUUCUUCUACCAUGUCAdTdT | 2360 |
| AD-61827.2 | GAAGAAAUUGAUCAUAUUGdTdT | 1794 | 553-571 | CAAUAUGAUCAAUUUCUUCdTdT | 2361 |
| AD-61833.2 | GAUCAUAUUGGAAUUAUCUdTdT | 1795 | 562-580 | AGAUAAUUCCAAUAUGAUCdTdT | 2362 |
| AD-61839.2 | GGAAUUAUCUCUUUUCCUGdTdT | 1796 | 571-589 | CAGGAAAAGAGAUAAUUCCdTdT | 2363 |
| AD-61845.2 | CUCUUUUCCUGACUUCAAGdTdT | 1797 | 579-597 | CUUGAAGUCAGGAAAAGAGdTdT | 2364 |
| AD-61851.2 | ACUUCAAGAUUCCGUCUAAdTdT | 1798 | 590-608 | UUAGACGGAAUCUUGAAGUdTdT | 2365 |
| AD-61857.2 | CCGUCUAAUCCUAGAUAUGdTdT | 1799 | 601-619 | CAUAUCUAGGAUUAGACGGdTdT | 2366 |
| AD-61863.2 | CCUAGAUAUGGUAUGUGGAdTdT | 1800 | 610-628 | UCCACAUACCAUAUCUAGGdTdT | 2367 |
| AD-61869.2 | UGUGGACGAUCAAGGCUAAdTdT | 1801 | 623-641 | UUAGCCUUGAUCGUCCACAdTdT | 2368 |
| AD-61828.2 | CGAUCAAGGCUAAAUAUAAdTdT | 1802 | 629-647 | UUAUAUUUAGCCUUGAUCGdTdT | 2369 |
| AD-61834.2 | AUAUAAAGAGGACUUUUCAdTdT | 1803 | 642-660 | UGAAAAGUCCUCUUUAUAUdTdT | 2370 |
| AD-61840.2 | GAGGACUUUUCAACAACUGdTdT | 1804 | 649-667 | CAGUUGUUGAAAAGUCCUCdTdT | 2371 |
| AD-61846.2 | CAACUGGAACCGCAUAUUUdTdT | 1805 | 662-680 | AAAUAUGCGGUUCCAGUUGdTdT | 2372 |
| AD-61852.2 | CGCAUAUUUUGAAGUUAAAdTdT | 1806 | 672-690 | UUUAACUUCAAAAUAUGCGdTdT | 2373 |
| AD-61858.2 | AAGUUAAAGAAUAUGUCUUdTdT | 1807 | 683-701 | AAGACAUAUUCUUUAACUUdTdT | 2374 |
| AD-61864.2 | GAAUAUGUCUUGCCACAUUdTdT | 1808 | 691-709 | AAUGUGGCAAGACAUAUUCdTdT | 2375 |
| AD-61870.2 | CCACAUUUUUCUGUCUCAAdTdT | 1809 | 703-721 | UUGAGACAGAAAAAUGUGGdTdT | 2376 |
| AD-61829.2 | CUGUCUCAAUCGAGCCAGAdTdT | 1810 | 713-731 | UCUGGCUCGAUUGAGACAGdTdT | 2377 |
| AD-61835.2 | CAAUCGAGCCAGAAUAUAAdTdT | 1811 | 719-737 | UUAUAUUCUGGCUCGAUUGdTdT | 2378 |
| AD-61841.2 | GAAUAUAAUUUCAUUGGUUdTdT | 1812 | 730-748 | AACCAAUGAAAUUAUAUUCdTdT | 2379 |
| AD-61847.2 | AUUGGUUACAAGAACUUUAdTdT | 1813 | 742-760 | UAAAGUUCUUGUAACCAAUdTdT | 2380 |
| AD-61853.2 | AGAACUUUAAGAAUUUUGAdTdT | 1814 | 752-770 | UCAAAAUUCUUAAAGUUCUdTdT | 2381 |
| AD-61859.2 | GAAUUUUGAAAUUACUAUAdTdT | 1815 | 762-780 | UAUAGUAAUUUCAAAAUUCdTdT | 2382 |
| AD-61865.2 | GAAAUUACUAUAAAAGCAAdTdT | 1816 | 769-787 | UUGCUUUUAUAGUAAUUUCdTdT | 2383 |
| AD-61871.2 | AAAGCAAGAUAUUUUUAUAdTdT | 1817 | 781-799 | UAUAAAAAUAUCUUGCUUUdTdT | 2384 |
| AD-61830.2 | AUAUUUUUAUAAUAAAGUAdTdT | 1818 | 789-807 | UACUUUAUUAUAAAAAUAUdTdT | 2385 |
| AD-61836.2 | AAGUAGUCACUGAGGCUGAdTdT | 1819 | 803-821 | UCAGCCUCAGUGACUACUUdTdT | 2386 |
| AD-61842.2 | CACUGAGGCUGACGUUUAUdTdT | 1820 | 810-828 | AUAAACGUCAGCCUCAGUGdTdT | 2387 |
| AD-61848.2 | CGUUUAUAUCACAUUUGGAdTdT | 1821 | 822-840 | UCCAAAUGUGAUAUAAACGdTdT | 2388 |
| AD-61854.2 | CACAUUUGGAAUAAGAGAAdTdT | 1822 | 831-849 | UUCUCUUAUUCCAAAUGUGdTdT | 2389 |
| AD-61860.2 | AAUAAGAGAAGACUUAAAAdTdT | 1823 | 840-858 | UUUUAAGUCUUCUCUUAUUdTdT | 2390 |
| AD-61866.2 | CUUAAAAGAUGAUCAAAAAdTdT | 1824 | 852-870 | UUUUUGAUCAUCUUUUAAGdTdT | 2391 |
| AD-61872.2 | GAUGAUCAAAAAGAAAUGAdTdT | 1825 | 859-877 | UCAUUUCUUUUUGAUCAUCdTdT | 2392 |
| AD-61831.2 | AAAUGAUGCAAACAGCAAUdTdT | 1826 | 872-890 | AUUGCUGUUUGCAUCAUUUdTdT | 2393 |
| AD-61837.2 | ACAGCAAUGCAAAACACAAdTdT | 1827 | 883-901 | UUGUGUUUUGCAUUGCUGUdTdT | 2394 |
| AD-61843.2 | AAAACACAAUGUUGAUAAAdTdT | 1828 | 893-911 | UUUAUCAACAUUGUGUUUUdTdT | 2395 |
| AD-61849.2 | CAAUGUUGAUAAAUGGAAUdTdT | 1829 | 899-917 | AUUCCAUUUAUCAACAUUGdTdT | 2396 |
| AD-61855.2 | GGAAUUGCUCAAGUCACAUdTdT | 1830 | 913-931 | AUGUGACUUGAGCAAUUCCdTdT | 2397 |
| AD-61861.2 | GCUCAAGUCACAUUUGAUUdTdT | 1831 | 919-937 | AAUCAAAUGUGACUUGAGCdTdT | 2398 |
| AD-61867.2 | AUUUGAUUCUGAAACAGCAdTdT | 1832 | 930-948 | UGCUGUUUCAGAAUCAAAUdTdT | 2399 |
| AD-62062.1 | UGAAACAGCAGUCAAAGAAdTdT | 1833 | 939-957 | UUCUUUGACUGCUGUUUCAdTdT | 2400 |
| AD-62068.1 | CAAAGAACUGUCAUACUACdTdT | 1834 | 951-969 | GUAGUAUGACAGUUCUUUGdTdT | 2401 |
| AD-62074.1 | CAUACUACAGUUUAGAAGAdTdT | 1835 | 962-980 | UCUUCUAAACUGUAGUAUGdTdT | 2402 |
| AD-62080.1 | CAGUUUAGAAGAUUUAAACdTdT | 1836 | 969-987 | GUUUAAAUCUUCUAAACUGdTdT | 2403 |
| AD-62086.1 | UAAACAACAAGUACCUUUAdTdT | 1837 | 983-1001 | UAAAGGUACUUGUUGUUUAdTdT | 2404 |
| AD-62092.1 | CAAGUACCUUUAUAUUGCUdTdT | 1838 | 990-1008 | AGCAAUAUAAAGGUACUUGdTdT | 2405 |
| AD-62098.1 | UAUUGCUGUAACAGUCAUAdTdT | 1839 | 1002-1020 | UAUGACUGUUACAGCAAUAdTdT | 2406 |
| AD-62104.1 | AACAGUCAUAGAGUCUACAdTdT | 1840 | 1011-1029 | UGUAGACUCUAUGACUGUUdTdT | 2407 |
| AD-62063.1 | AGAGUCUACAGGUGGAUUUdTdT | 1841 | 1020-1038 | AAAUCCACCUGUAGACUCUdTdT | 2408 |
| AD-62069.1 | GGAUUUUCUGAAGAGGCAGdTdT | 1842 | 1033-1051 | CUGCCUCUUCAGAAAAUCCdTdT | 2409 |
| AD-62075.1 | GAAGAGGCAGAAAUACCUGdTdT | 1843 | 1042-1060 | CAGGUAUUUCUGCCUCUUCdTdT | 2410 |
| AD-62081.1 | AGAAAUACCUGGCAUCAAAdTdT | 1844 | 1050-1068 | UUUGAUGCCAGGUAUUUCUdTdT | 2411 |
| AD-62087.1 | GCAUCAAAUAUGUCCUCUCdTdT | 1845 | 1061-1079 | GAGAGGACAUAUUUGAUGCdTdT | 2412 |
| AD-62093.1 | UGUCCUCUCUCCCUACAAAdTdT | 1846 | 1071-1089 | UUUGUAGGGAGAGAGGACAdTdT | 2413 |
| AD-62099.1 | GAAUUUGGUUGCUACUCCUdTdT | 1847 | 1092-1110 | AGGAGUAGCAACCAAAUUCdTdT | 2414 |
| AD-62105.1 | GCUACUCCUCUUUUCCUGAdTdT | 1848 | 1102-1120 | UCAGGAAAAGAGGAGUAGCdTdT | 2415 |
| AD-62064.1 | CUCUUUUCCUGAAGCCUGGdTdT | 1849 | 1109-1127 | CCAGGCUUCAGGAAAAGAGdTdT | 2416 |
| AD-62070.1 | CCUGGGAUUCCAUAUCCCAdTdT | 1850 | 1123-1141 | UGGGAUAUGGAAUCCCAGGdTdT | 2417 |
| AD-62076.1 | CAUAUCCCAUCAAGGUGCAdTdT | 1851 | 1133-1151 | UGCACCUUGAUGGGAUAUGdTdT | 2418 |
| AD-62082.1 | CCAUCAAGGUGCAGGUUAAdTdT | 1852 | 1139-1157 | UUAACCUGCACCUUGAUGGdTdT | 2419 |
| AD-62088.1 | CAGGUUAAAGAUUCGCUUGdTdT | 1853 | 1150-1168 | CAAGCGAAUCUUUAACCUGdTdT | 2420 |
| AD-62094.1 | UUCGCUUGACCAGUUGGUAdTdT | 1854 | 1161-1179 | UACCAACUGGUCAAGCGAAdTdT | 2421 |
| AD-62100.1 | CCAGUUGGUAGGAGGAGUCdTdT | 1855 | 1170-1188 | GACUCCUCCUACCAACUGGdTdT | 2422 |
| AD-62106.1 | GGAGGAGUCCCAGUAACACdTdT | 1856 | 1180-1198 | GUGUUACUGGGACUCCUCCdTdT | 2423 |
| AD-62065.1 | CAGUAACACUGAAUGCACAdTdT | 1857 | 1190-1208 | UGUGCAUUCAGUGUUACUGdTdT | 2424 |
| AD-62071.1 | GAAUGCACAAACAAUUGAUdTdT | 1858 | 1200-1218 | AUCAAUUGUUUGUGCAUUCdTdT | 2425 |
| AD-62077.1 | AACAAUUGAUGUAAACCAAdTdT | 1859 | 1209-1227 | UUGGUUUACAUCAAUUGUUdTdT | 2426 |
| AD-62083.1 | UAAACCAAGAGACAUCUGAdTdT | 1860 | 1220-1238 | UCAGAUGUCUCUUGGUUUAdTdT | 2427 |
| AD-62089.1 | CAUCUGACUUGGAUCCAAGdTdT | 1861 | 1232-1250 | CUUGGAUCCAAGUCAGAUGdTdT | 2428 |
| AD-62095.1 | GAUCCAAGCAAAAGUGUAAdTdT | 1862 | 1243-1261 | UUACACUUUUGCUUGGAUCdTdT | 2429 |
| AD-62101.1 | CAAAAGUGUAACACGUGUUdTdT | 1863 | 1251-1269 | AACACGUGUUACACUUUUGdTdT | 2430 |
| AD-62107.1 | AACACGUGUUGAUGAUGGAdTdT | 1864 | 1260-1278 | UCCAUCAUCAACACGUGUUdTdT | 2431 |
| AD-62066.1 | UGAUGGAGUAGCUUCCUUUdTdT | 1865 | 1272-1290 | AAAGGAAGCUACUCCAUCAdTdT | 2432 |
| AD-62072.1 | GUAGCUUCCUUUGUGCUUAdTdT | 1866 | 1279-1297 | UAAGCACAAAGGAAGCUACdTdT | 2433 |
| AD-62078.1 | GCUUAAUCUCCCAUCUGGAdTdT | 1867 | 1293-1311 | UCCAGAUGGGAGAUUAAGCdTdT | 2434 |
| AD-62084.1 | CCAUCUGGAGUGACGGUGCdTdT | 1868 | 1303-1321 | GCACCGUCACUCCAGAUGGdTdT | 2435 |
| AD-62090.1 | UGACGGUGCUGGAGUUUAAdTdT | 1869 | 1313-1331 | UUAAACUCCAGCACCGUCAdTdT | 2436 |
| AD-62096.1 | GCUGGAGUUUAAUGUCAAAdTdT | 1870 | 1320-1338 | UUUGACAUUAAACUCCAGCdTdT | 2437 |
| AD-62102.1 | UGUCAAAACUGAUGCUCCAdTdT | 1871 | 1332-1350 | UGGAGCAUCAGUUUUGACAdTdT | 2438 |
| AD-62108.1 | GAUGCUCCAGAUCUUCCAGdTdT | 1872 | 1342-1360 | CUGGAAGAUCUGGAGCAUCdTdT | 2439 |
| AD-62067.1 | CAGAUCUUCCAGAAGAAAAdTdT | 1873 | 1349-1367 | UUUUCUUCUGGAAGAUCUGdTdT | 2440 |
| AD-62073.1 | AGAAAAUCAGGCCAGGGAAdTdT | 1874 | 1362-1380 | UUCCCUGGCCUGAUUUUCUdTdT | 2441 |
| AD-62079.1 | GGCCAGGGAAGGUUACCGAdTdT | 1875 | 1371-1389 | UCGGUAACCUUCCCUGGCCdTdT | 2442 |
| AD-62085.1 | GUUACCGAGCAAUAGCAUAdTdT | 1876 | 1382-1400 | UAUGCUAUUGCUCGGUAACdTdT | 2443 |
| AD-62091.1 | AUAGCAUACUCAUCUCUCAdTdT | 1877 | 1393-1411 | UGAGAGAUGAGUAUGCUAUdTdT | 2444 |
| AD-62097.1 | UACUCAUCUCUCAGCCAAAdTdT | 1878 | 1399-1417 | UUUGGCUGAGAGAUGAGUAdTdT | 2445 |
| AD-62103.1 | GCCAAAGUUACCUUUAUAUdTdT | 1879 | 1412-1430 | AUAUAAAGGUAACUUUGGCdTdT | 2446 |
| AD-62109.1 | CCUUUAUAUUGAUUGGACUdTdT | 1880 | 1422-1440 | AGUCCAAUCAAUAUAAAGGdTdT | 2447 |
| AD-62115.1 | GAUUGGACUGAUAACCAUAdTdT | 1881 | 1432-1450 | UAUGGUUAUCAGUCCAAUCdTdT | 2448 |
| AD-62121.1 | CUGAUAACCAUAAGGCUUUdTdT | 1882 | 1439-1457 | AAAGCCUUAUGGUUAUCAGdTdT | 2449 |
| AD-62127.1 | AGGCUUUGCUAGUGGGAGAdTdT | 1883 | 1451-1469 | UCUCCCACUAGCAAAGCCUdTdT | 2450 |
| AD-62133.1 | GUGGGAGAACAUCUGAAUAdTdT | 1884 | 1462-1480 | UAUUCAGAUGUUCUCCCACdTdT | 2451 |
| AD-62139.1 | CAUCUGAAUAUUAUUGUUAdTdT | 1885 | 1471-1489 | UAACAAUAAUAUUCAGAUGdTdT | 2452 |
| AD-62145.1 | UAUUAUUGUUACCCCCAAAdTdT | 1886 | 1479-1497 | UUUGGGGGUAACAAUAAUAdTdT | 2453 |
| AD-62151.1 | CCCAAAAGCCCAUAUAUUGdTdT | 1887 | 1492-1510 | CAAUAUAUGGGCUUUUGGGdTdT | 2454 |
| AD-62110.1 | CCAAAAGCCCAUAUAUUGAdTdT | 1888 | 1493-1511 | UCAAUAUAUGGGCUUUUGGdTdT | 2455 |
| AD-62116.1 | CAAAAGCCCAUAUAUUGACdTdT | 1889 | 1494-1512 | GUCAAUAUAUGGGCUUUUGdTdT | 2456 |
| AD-62122.1 | AAAAGCCCAUAUAUUGACAdTdT | 1890 | 1495-1513 | UGUCAAUAUAUGGGCUUUUdTdT | 2457 |
| AD-62128.1 | AAAGCCCAUAUAUUGACAAdTdT | 1891 | 1496-1514 | UUGUCAAUAUAUGGGCUUUdTdT | 2458 |
| AD-62134.1 | AAGCCCAUAUAUUGACAAAdTdT | 1892 | 1497-1515 | UUUGUCAAUAUAUGGGCUUdTdT | 2459 |
| AD-62140.1 | AGCCCAUAUAUUGACAAAAdTdT | 1893 | 1498-1516 | UUUUGUCAAUAUAUGGGCUdTdT | 2460 |
| AD-62146.1 | GCCCAUAUAUUGACAAAAUdTdT | 1894 | 1499-1517 | AUUUUGUCAAUAUAUGGGCdTdT | 2461 |
| AD-62152.1 | CCCAUAUAUUGACAAAAUAdTdT | 1895 | 1500-1518 | UAUUUUGUCAAUAUAUGGGdTdT | 2462 |
| AD-62111.1 | CCAUAUAUUGACAAAAUAAdTdT | 1896 | 1501-1519 | UUAUUUUGUCAAUAUAUGGdTdT | 2463 |
| AD-62117.1 | CAUAUAUUGACAAAAUAACdTdT | 1897 | 1502-1520 | GUUAUUUUGUCAAUAUAUGdTdT | 2464 |
| AD-62123.1 | AUAUAUUGACAAAAUAACUdTdT | 1898 | 1503-1521 | AGUUAUUUUGUCAAUAUAUdTdT | 2465 |
| AD-62129.1 | UAUAUUGACAAAAUAACUCdTdT | 1899 | 1504-1522 | GAGUUAUUUUGUCAAUAUAdTdT | 2466 |
| AD-62135.1 | AUAUUGACAAAAUAACUCAdTdT | 1900 | 1505-1523 | UGAGUUAUUUUGUCAAUAUdTdT | 2467 |
| AD-62141.1 | UAUUGACAAAAUAACUCACdTdT | 1901 | 1506-1524 | GUGAGUUAUUUUGUCAAUAdTdT | 2468 |
| AD-62147.1 | AUUGACAAAAUAACUCACUdTdT | 1902 | 1507-1525 | AGUGAGUUAUUUUGUCAAUdTdT | 2469 |
| AD-62153.1 | UUGACAAAAUAACUCACUAdTdT | 1903 | 1508-1526 | UAGUGAGUUAUUUUGUCAAdTdT | 2470 |
| AD-62112.1 | UGACAAAAUAACUCACUAUdTdT | 1904 | 1509-1527 | AUAGUGAGUUAUUUUGUCAdTdT | 2471 |
| AD-62118.1 | GACAAAAUAACUCACUAUAdTdT | 1905 | 1510-1528 | UAUAGUGAGUUAUUUUGUCdTdT | 2472 |
| AD-62124.1 | AAAAUAACUCACUAUAAUUdTdT | 1906 | 1513-1531 | AAUUAUAGUGAGUUAUUUUdTdT | 2473 |
| AD-62130.1 | AAAUAACUCACUAUAAUUAdTdT | 1907 | 1514-1532 | UAAUUAUAGUGAGUUAUUUdTdT | 2474 |
| AD-62136.1 | AAUAACUCACUAUAAUUACdTdT | 1908 | 1515-1533 | GUAAUUAUAGUGAGUUAUUdTdT | 2475 |
| AD-62142.1 | AUAACUCACUAUAAUUACUdTdT | 1909 | 1516-1534 | AGUAAUUAUAGUGAGUUAUdTdT | 2476 |
| AD-62148.1 | AACUCACUAUAAUUACUUGdTdT | 1910 | 1518-1536 | CAAGUAAUUAUAGUGAGUUdTdT | 2477 |
| AD-62154.1 | ACUCACUAUAAUUACUUGAdTdT | 1911 | 1519-1537 | UCAAGUAAUUAUAGUGAGUdTdT | 2478 |
| AD-62113.1 | CUCACUAUAAUUACUUGAUdTdT | 1912 | 1520-1538 | AUCAAGUAAUUAUAGUGAGdTdT | 2479 |
| AD-62119.1 | UCACUAUAAUUACUUGAUUdTdT | 1913 | 1521-1539 | AAUCAAGUAAUUAUAGUGAdTdT | 2480 |
| AD-62125.1 | ACUAUAAUUACUUGAUUUUdTdT | 1914 | 1523-1541 | AAAAUCAAGUAAUUAUAGUdTdT | 2481 |
| AD-62131.1 | CUAUAAUUACUUGAUUUUAdTdT | 1915 | 1524-1542 | UAAAAUCAAGUAAUUAUAGdTdT | 2482 |
| AD-62137.1 | UAUAAUUACUUGAUUUUAUdTdT | 1916 | 1525-1543 | AUAAAAUCAAGUAAUUAUAdTdT | 2483 |
| AD-62143.1 | AUAAUUACUUGAUUUUAUCdTdT | 1917 | 1526-1544 | GAUAAAAUCAAGUAAUUAUdTdT | 2484 |
| AD-62149.1 | UAAUUACUUGAUUUUAUCCdTdT | 1918 | 1527-1545 | GGAUAAAAUCAAGUAAUUAdTdT | 2485 |
| AD-62155.1 | AAUUACUUGAUUUUAUCCAdTdT | 1919 | 1528-1546 | UGGAUAAAAUCAAGUAAUUdTdT | 2486 |
| AD-62114.1 | AUUACUUGAUUUUAUCCAAdTdT | 1920 | 1529-1547 | UUGGAUAAAAUCAAGUAAUdTdT | 2487 |
| AD-62120.1 | UUAUCCAAGGGCAAAAUUAdTdT | 1921 | 1540-1558 | UAAUUUUGCCCUUGGAUAAdTdT | 2488 |
| AD-62126.1 | GCAAAAUUAUCCACUUUGGdTdT | 1922 | 1550-1568 | CCAAAGUGGAUAAUUUUGCdTdT | 2489 |
| AD-62132.1 | CACUUUGGCACGAGGGAGAdTdT | 1923 | 1561-1579 | UCUCCCUCGUGCCAAAGUGdTdT | 2490 |
| AD-62138.1 | CGAGGGAGAAAUUUUCAGAdTdT | 1924 | 1571-1589 | UCUGAAAAUUUCUCCCUCGdTdT | 2491 |
| AD-62144.1 | AUUUUCAGAUGCAUCUUAUdTdT | 1925 | 1581-1599 | AUAAGAUGCAUCUGAAAAUdTdT | 2492 |
| AD-62150.1 | GCAUCUUAUCAAAGUAUAAdTdT | 1926 | 1591-1609 | UUAUACUUUGAUAAGAUGCdTdT | 2493 |
| AD-62156.1 | CAAAGUAUAAACAUUCCAGdTdT | 1927 | 1600-1618 | CUGGAAUGUUUAUACUUUGdTdT | 2494 |
| AD-62162.1 | AUUCCAGUAACACAGAACAdTdT | 1928 | 1612-1630 | UGUUCUGUGUUACUGGAAUdTdT | 2495 |
| AD-62168.1 | CACAGAACAUGGUUCCUUCdTdT | 1929 | 1622-1640 | GAAGGAACCAUGUUCUGUGdTdT | 2496 |
| AD-62174.1 | GGUUCCUUCAUCCCGACUUdTdT | 1930 | 1632-1650 | AAGUCGGGAUGAAGGAACCdTdT | 2497 |
| AD-62180.1 | CCCGACUUCUGGUCUAUUAdTdT | 1931 | 1643-1661 | UAAUAGACCAGAAGUCGGGdTdT | 2498 |
| AD-62186.1 | GGUCUAUUACAUCGUCACAdTdT | 1932 | 1653-1671 | UGUGACGAUGUAAUAGACCdTdT | 2499 |
| AD-62192.1 | AUCGUCACAGGAGAACAGAdTdT | 1933 | 1663-1681 | UCUGUUCUCCUGUGACGAUdTdT | 2500 |
| AD-62198.1 | CAGGAGAACAGACAGCAGAdTdT | 1934 | 1670-1688 | UCUGCUGUCUGUUCUCCUGdTdT | 2501 |
| AD-62157.1 | CAGCAGAAUUAGUGUCUGAdTdT | 1935 | 1682-1700 | UCAGACACUAAUUCUGCUGdTdT | 2502 |
| AD-62163.1 | GUGUCUGAUUCAGUCUGGUdTdT | 1936 | 1693-1711 | ACCAGACUGAAUCAGACACdTdT | 2503 |
| AD-62169.1 | CAGUCUGGUUAAAUAUUGAdTdT | 1937 | 1703-1721 | UCAAUAUUUAACCAGACUGdTdT | 2504 |
| AD-62175.1 | GUUAAAUAUUGAAGAAAAAdTdT | 1938 | 1710-1728 | UUUUUCUUCAAUAUUUAACdTdT | 2505 |
| AD-62181.1 | AGAAAAAUGUGGCAACCAGdTdT | 1939 | 1722-1740 | CUGGUUGCCACAUUUUUCUdTdT | 2506 |
| AD-62187.1 | GCAACCAGCUCCAGGUUCAdTdT | 1940 | 1733-1751 | UGAACCUGGAGCUGGUUGCdTdT | 2507 |
| AD-62193.1 | GCUCCAGGUUCAUCUGUCUdTdT | 1941 | 1740-1758 | AGACAGAUGAACCUGGAGCdTdT | 2508 |
| AD-62199.1 | AUCUGUCUCCUGAUGCAGAdTdT | 1942 | 1751-1769 | UCUGCAUCAGGAGACAGAUdTdT | 2509 |
| AD-62158.1 | GAUGCAGAUGCAUAUUCUCdTdT | 1943 | 1762-1780 | GAGAAUAUGCAUCUGCAUCdTdT | 2510 |
| AD-62164.1 | GCAUAUUCUCCAGGCCAAAdTdT | 1944 | 1771-1789 | UUUGGCCUGGAGAAUAUGCdTdT | 2511 |
| AD-62170.1 | AGGCCAAACUGUGUCUCUUdTdT | 1945 | 1782-1800 | AAGAGACACAGUUUGGCCUdTdT | 2512 |
| AD-62176.1 | GUGUCUCUUAAUAUGGCAAdTdT | 1946 | 1792-1810 | UUGCCAUAUUAAGAGACACdTdT | 2513 |
| AD-62182.1 | UUAAUAUGGCAACUGGAAUdTdT | 1947 | 1799-1817 | AUUCCAGUUGCCAUAUUAAdTdT | 2514 |
| AD-62188.1 | AACUGGAAUGGAUUCCUGGdTdT | 1948 | 1809-1827 | CCAGGAAUCCAUUCCAGUUdTdT | 2515 |
| AD-62194.1 | UUCCUGGGUGGCAUUAGCAdTdT | 1949 | 1821-1839 | UGCUAAUGCCACCCAGGAAdTdT | 2516 |
| AD-62200.1 | GGCAUUAGCAGCAGUGGACdTdT | 1950 | 1830-1848 | GUCCACUGCUGCUAAUGCCdTdT | 2517 |
| AD-62159.1 | AGUGGACAGUGCUGUGUAUdTdT | 1951 | 1842-1860 | AUACACAGCACUGUCCACUdTdT | 2518 |
| AD-62165.1 | GCUGUGUAUGGAGUCCAAAdTdT | 1952 | 1852-1870 | UUUGGACUCCAUACACAGCdTdT | 2519 |
| AD-62171.1 | AGUCCAAAGAGGAGCCAAAdTdT | 1953 | 1863-1881 | UUUGGCUCCUCUUUGGACUdTdT | 2520 |
| AD-62177.1 | AGAGGAGCCAAAAAGCCCUdTdT | 1954 | 1870-1888 | AGGGCUUUUUGGCUCCUCUdTdT | 2521 |
| AD-62183.1 | AGCCCUUGGAAAGAGUAUUdTdT | 1955 | 1883-1901 | AAUACUCUUUCCAAGGGCUdTdT | 2522 |
| AD-62189.1 | AAGAGUAUUUCAAUUCUUAdTdT | 1956 | 1893-1911 | UAAGAAUUGAAAUACUCUUdTdT | 2523 |
| AD-62195.1 | UUUCAAUUCUUAGAGAAGAdTdT | 1957 | 1900-1918 | UCUUCUCUAAGAAUUGAAAdTdT | 2524 |
| AD-62201.1 | GAGAAGAGUGAUCUGGGCUdTdT | 1958 | 1912-1930 | AGCCCAGAUCACUCUUCUCdTdT | 2525 |
| AD-62160.1 | UGAUCUGGGCUGUGGGGCAdTdT | 1959 | 1920-1938 | UGCCCCACAGCCCAGAUCAdTdT | 2526 |
| AD-62166.1 | GGGGCAGGUGGUGGCCUCAdTdT | 1960 | 1933-1951 | UGAGGCCACCACCUGCCCCdTdT | 2527 |
| AD-62172.1 | GUGGCCUCAACAAUGCCAAdTdT | 1961 | 1943-1961 | UUGGCAUUGUUGAGGCCACdTdT | 2528 |
| AD-62178.1 | CAACAAUGCCAAUGUGUUCdTdT | 1962 | 1950-1968 | GAACACAUUGGCAUUGUUGdTdT | 2529 |
| AD-62184.1 | CAAUGUGUUCCACCUAGCUdTdT | 1963 | 1959-1977 | AGCUAGGUGGAACACAUUGdTdT | 2530 |
| AD-62190.1 | CACCUAGCUGGACUUACCUdTdT | 1964 | 1969-1987 | AGGUAAGUCCAGCUAGGUGdTdT | 2531 |
| AD-62196.1 | GACUUACCUUCCUCACUAAdTdT | 1965 | 1979-1997 | UUAGUGAGGAAGGUAAGUCdTdT | 2532 |
| AD-62202.1 | UCACUAAUGCAAAUGCAGAdTdT | 1966 | 1991-2009 | UCUGCAUUUGCAUUAGUGAdTdT | 2533 |
| AD-62161.1 | AAAUGCAGAUGACUCCCAAdTdT | 1967 | 2001-2019 | UUGGGAGUCAUCUGCAUUUdTdT | 2534 |
| AD-62167.1 | CUCCCAAGAAAAUGAUGAAdTdT | 1968 | 2013-2031 | UUCAUCAUUUUCUUGGGAGdTdT | 2535 |
| AD-62173.1 | CCUUGUAAAGAAAUUCUCAdTdT | 1969 | 2032-2050 | UGAGAAUUUCUUUACAAGGdTdT | 2536 |
| AD-62179.1 | AAUUCUCAGGCCAAGAAGAdTdT | 1970 | 2043-2061 | UCUUCUUGGCCUGAGAAUUdTdT | 2537 |
| AD-62185.1 | CCAAGAAGAACGCUGCAAAdTdT | 1971 | 2053-2071 | UUUGCAGCGUUCUUCUUGGdTdT | 2538 |
| AD-62191.1 | CGCUGCAAAAGAAGAUAGAdTdT | 1972 | 2063-2081 | UCUAUCUUCUUUUGCAGCGdTdT | 2539 |
| AD-62197.1 | AAAGAAGAUAGAAGAAAUAdTdT | 1973 | 2070-2088 | UAUUUCUUCUAUCUUCUUUdTdT | 2540 |
| AD-62203.1 | AGAAAUAGCUGCUAAAUAUdTdT | 1974 | 2082-2100 | AUAUUUAGCAGCUAUUUCUdTdT | 2541 |
| AD-62209.1 | GCUGCUAAAUAUAAACAUUdTdT | 1975 | 2089-2107 | AAUGUUUAUAUUUAGCAGCdTdT | 2542 |
| AD-62215.1 | ACAUUCAGUAGUGAAGAAAdTdT | 1976 | 2103-2121 | UUUCUUCACUACUGAAUGUdTdT | 2543 |
| AD-62221.1 | GUAGUGAAGAAAUGUUGUUdTdT | 1977 | 2110-2128 | AACAACAUUUCUUCACUACdTdT | 2544 |
| AD-62227.1 | AAAUGUUGUUACGAUGGAGdTdT | 1978 | 2119-2137 | CUCCAUCGUAACAACAUUUdTdT | 2545 |
| AD-62233.1 | CGAUGGAGCCUGCGUUAAUdTdT | 1979 | 2130-2148 | AUUAACGCAGGCUCCAUCGdTdT | 2546 |
| AD-62239.1 | CGUUAAUAAUGAUGAAACCdTdT | 1980 | 2142-2160 | GGUUUCAUCAUUAUUAACGdTdT | 2547 |
| AD-62245.1 | AUGAUGAAACCUGUGAGCAdTdT | 1981 | 2150-2168 | UGCUCACAGGUUUCAUCAUdTdT | 2548 |
| AD-62204.1 | CUGUGAGCAGCGAGCUGCAdTdT | 1982 | 2160-2178 | UGCAGCUCGCUGCUCACAGdTdT | 2549 |
| AD-62210.1 | CGAGCUGCACGGAUUAGUUdTdT | 1983 | 2170-2188 | AACUAAUCCGUGCAGCUCGdTdT | 2550 |
| AD-62216.1 | GGAUUAGUUUAGGGCCAAGdTdT | 1984 | 2180-2198 | CUUGGCCCUAAACUAAUCCdTdT | 2551 |
| AD-62222.1 | GGGCCAAGAUGCAUCAAAGdTdT | 1985 | 2191-2209 | CUUUGAUGCAUCUUGGCCCdTdT | 2552 |
| AD-62228.1 | CAUCAAAGCUUUCACUGAAdTdT | 1986 | 2202-2220 | UUCAGUGAAAGCUUUGAUGdTdT | 2553 |
| AD-62234.1 | GCUUUCACUGAAUGUUGUGdTdT | 1987 | 2209-2227 | CACAACAUUCAGUGAAAGCdTdT | 2554 |
| AD-62240.1 | AAUGUUGUGUCGUCGCAAGdTdT | 1988 | 2219-2237 | CUUGCGACGACACAACAUUdTdT | 2555 |
| AD-62246.1 | CGUCGCAAGCCAGCUCCGUdTdT | 1989 | 2229-2247 | ACGGAGCUGGCUUGCGACGdTdT | 2556 |
| AD-62205.1 | GCUCCGUGCUAAUAUCUCUdTdT | 1990 | 2241-2259 | AGAGAUAUUAGCACGGAGCdTdT | 2557 |
| AD-62211.1 | CUAAUAUCUCUCAUAAAGAdTdT | 1991 | 2249-2267 | UCUUUAUGAGAGAUAUUAGdTdT | 2558 |
| AD-62217.1 | AAAGACAUGCAAUUGGGAAdTdT | 1992 | 2263-2281 | UUCCCAAUUGCAUGUCUUUdTdT | 2559 |
| AD-62223.1 | CAAUUGGGAAGGCUACACAdTdT | 1993 | 2272-2290 | UGUGUAGCCUUCCCAAUUGdTdT | 2560 |
| AD-62229.1 | GCUACACAUGAAGACCCUGdTdT | 1994 | 2283-2301 | CAGGGUCUUCAUGUGUAGCdTdT | 2561 |
| AD-62235.1 | CAUGAAGACCCUGUUACCAdTdT | 1995 | 2289-2307 | UGGUAACAGGGUCUUCAUGdTdT | 2562 |
| AD-62241.1 | UACCAGUAAGCAAGCCAGAdTdT | 1996 | 2303-2321 | UCUGGCUUGCUUACUGGUAdTdT | 2563 |
| AD-62247.1 | AGCAAGCCAGAAAUUCGGAdTdT | 1997 | 2311-2329 | UCCGAAUUUCUGGCUUGCUdTdT | 2564 |
| AD-62206.1 | AGAAAUUCGGAGUUAUUUUdTdT | 1998 | 2319-2337 | AAAAUAACUCCGAAUUUCUdTdT | 2565 |
| AD-62212.1 | AGUUAUUUUCCAGAAAGCUdTdT | 1999 | 2329-2347 | AGCUUUCUGGAAAAUAACUdTdT | 2566 |
| AD-62218.1 | CAGAAAGCUGGUUGUGGGAdTdT | 2000 | 2339-2357 | UCCCACAACCAGCUUUCUGdTdT | 2567 |
| AD-62224.1 | GUGGGAAGUUCAUCUUGUUdTdT | 2001 | 2352-2370 | AACAAGAUGAACUUCCCACdTdT | 2568 |
| AD-62230.1 | UCAUCUUGUUCCCAGAAGAdTdT | 2002 | 2361-2379 | UCUUCUGGGAACAAGAUGAdTdT | 2569 |
| AD-62236.1 | CCAGAAGAAAACAGUUGCAdTdT | 2003 | 2372-2390 | UGCAACUGUUUUCUUCUGGdTdT | 2570 |
| AD-62242.1 | CAGUUGCAGUUUGCCCUACdTdT | 2004 | 2383-2401 | GUAGGGCAAACUGCAACUGdTdT | 2571 |
| AD-62248.1 | CAGUUUGCCCUACCUGAUUdTdT | 2005 | 2389-2407 | AAUCAGGUAGGGCAAACUGdTdT | 2572 |
| AD-62207.1 | CCUGAUUCUCUAACCACCUdTdT | 2006 | 2401-2419 | AGGUGGUUAGAGAAUCAGGdTdT | 2573 |
| AD-62213.1 | ACCACCUGGGAAAUUCAAGdTdT | 2007 | 2413-2431 | CUUGAAUUUCCCAGGUGGUdTdT | 2574 |
| AD-62219.1 | GAAAUUCAAGGCGUUGGCAdTdT | 2008 | 2422-2440 | UGCCAACGCCUUGAAUUUCdTdT | 2575 |
| AD-62225.1 | CGUUGGCAUUUCAAACACUdTdT | 2009 | 2433-2451 | AGUGUUUGAAAUGCCAACGdTdT | 2576 |
| AD-62231.1 | CAUUUCAAACACUGGUAUAdTdT | 2010 | 2439-2457 | UAUACCAGUGUUUGAAAUGdTdT | 2577 |
| AD-62237.1 | GUAUAUGUGUUGCUGAUACdTdT | 2011 | 2453-2471 | GUAUCAGCAACACAUAUACdTdT | 2578 |
| AD-62243.1 | UGCUGAUACUGUCAAGGCAdTdT | 2012 | 2463-2481 | UGCCUUGACAGUAUCAGCAdTdT | 2579 |
| AD-62249.1 | CUGUCAAGGCAAAGGUGUUdTdT | 2013 | 2471-2489 | AACACCUUUGCCUUGACAGdTdT | 2580 |
| AD-62208.1 | AGGUGUUCAAAGAUGUCUUdTdT | 2014 | 2483-2501 | AAGACAUCUUUGAACACCUdTdT | 2581 |
| AD-62214.1 | CAAAGAUGUCUUCCUGGAAdTdT | 2015 | 2490-2508 | UUCCAGGAAGACAUCUUUGdTdT | 2582 |
| AD-62220.1 | CUUCCUGGAAAUGAAUAUAdTdT | 2016 | 2499-2517 | UAUAUUCAUUUCCAGGAAGdTdT | 2583 |
| AD-62226.1 | GAAUAUACCAUAUUCUGUUdTdT | 2017 | 2511-2529 | AACAGAAUAUGGUAUAUUCdTdT | 2584 |
| AD-62232.1 | AUAUUCUGUUGUACGAGGAdTdT | 2018 | 2520-2538 | UCCUCGUACAACAGAAUAUdTdT | 2585 |
| AD-62238.1 | CGAGGAGAACAGAUCCAAUdTdT | 2019 | 2533-2551 | AUUGGAUCUGUUCUCCUCGdTdT | 2586 |
| AD-62244.1 | GAACAGAUCCAAUUGAAAGdTdT | 2020 | 2539-2557 | CUUUCAAUUGGAUCUGUUCdTdT | 2587 |
| AD-61874.1 | GAAAGGAACUGUUUACAACdTdT | 2021 | 2553-2571 | GUUGUAAACAGUUCCUUUCdTdT | 2588 |
| AD-61880.1 | ACUGUUUACAACUAUAGGAdTdT | 2022 | 2560-2578 | UCCUAUAGUUGUAAACAGUdTdT | 2589 |
| AD-61886.1 | AACUAUAGGACUUCUGGGAdTdT | 2023 | 2569-2587 | UCCCAGAAGUCCUAUAGUUdTdT | 2590 |
| AD-61892.1 | UGGGAUGCAGUUCUGUGUUdTdT | 2024 | 2583-2601 | AACACAGAACUGCAUCCCAdTdT | 2591 |
| AD-61898.1 | GUUCUGUGUUAAAAUGUCUdTdT | 2025 | 2592-2610 | AGACAUUUUAACACAGAACdTdT | 2592 |
| AD-61904.1 | UUAAAAUGUCUGCUGUGGAdTdT | 2026 | 2600-2618 | UCCACAGCAGACAUUUUAAdTdT | 2593 |
| AD-61910.1 | CUGUGGAGGGAAUCUGCACdTdT | 2027 | 2612-2630 | GUGCAGAUUCCCUCCACAGdTdT | 2594 |
| AD-61916.1 | GGAAUCUGCACUUCGGAAAdTdT | 2028 | 2620-2638 | UUUCCGAAGUGCAGAUUCCdTdT | 2595 |
| AD-61875.1 | CGGAAAGCCCAGUCAUUGAdTdT | 2029 | 2633-2651 | UCAAUGACUGGGCUUUCCGdTdT | 2596 |
| AD-61881.1 | CCAGUCAUUGAUCAUCAGGdTdT | 2030 | 2641-2659 | CCUGAUGAUCAAUGACUGGdTdT | 2597 |
| AD-61887.1 | CAUCAGGGCACAAAGUCCUdTdT | 2031 | 2653-2671 | AGGACUUUGUGCCCUGAUGdTdT | 2598 |
| AD-61893.1 | GGCACAAAGUCCUCCAAAUdTdT | 2032 | 2659-2677 | AUUUGGAGGACUUUGUGCCdTdT | 2599 |
| AD-61899.1 | CAAAUGUGUGCGCCAGAAAdTdT | 2033 | 2673-2691 | UUUCUGGCGCACACAUUUGdTdT | 2600 |
| AD-61905.1 | GCGCCAGAAAGUAGAGGGCdTdT | 2034 | 2682-2700 | GCCCUCUACUUUCUGGCGCdTdT | 2601 |
| AD-61911.1 | AGUAGAGGGCUCCUCCAGUdTdT | 2035 | 2691-2709 | ACUGGAGGAGCCCUCUACUdTdT | 2602 |
| AD-61917.1 | CCUCCAGUCACUUGGUGACdTdT | 2036 | 2702-2720 | GUCACCAAGUGACUGGAGGdTdT | 2603 |
| AD-61876.1 | UCACUUGGUGACAUUCACUdTdT | 2037 | 2709-2727 | AGUGAAUGUCACCAAGUGAdTdT | 2604 |
| AD-61882.1 | CAUUCACUGUGCUUCCUCUdTdT | 2038 | 2720-2738 | AGAGGAAGCACAGUGAAUGdTdT | 2605 |
| AD-61888.1 | GGAAAUUGGCCUUCACAACdTdT | 2039 | 2739-2757 | GUUGUGAAGGCCAAUUUCCdTdT | 2606 |
| AD-61894.1 | CUUCACAACAUCAAUUUUUdTdT | 2040 | 2749-2767 | AAAAAUUGAUGUUGUGAAGdTdT | 2607 |
| AD-61900.1 | AAUUUUUCACUGGAGACUUdTdT | 2041 | 2761-2779 | AAGUCUCCAGUGAAAAAUUdTdT | 2608 |
| AD-61906.1 | CUGGAGACUUGGUUUGGAAdTdT | 2042 | 2770-2788 | UUCCAAACCAAGUCUCCAGdTdT | 2609 |
| AD-61912.1 | GGUUUGGAAAAGAAAUCUUdTdT | 2043 | 2780-2798 | AAGAUUUCUUUUCCAAACCdTdT | 2610 |
| AD-61918.1 | AAUCUUAGUAAAAACAUUAdTdT | 2044 | 2793-2811 | UAAUGUUUUUACUAAGAUUdTdT | 2611 |
| AD-61877.1 | AAAAACAUUACGAGUGGUGdTdT | 2045 | 2802-2820 | CACCACUCGUAAUGUUUUUdTdT | 2612 |
| AD-61883.1 | GAGUGGUGCCAGAAGGUGUdTdT | 2046 | 2813-2831 | ACACCUUCUGGCACCACUCdTdT | 2613 |
| AD-61889.1 | AGAAGGUGUCAAAAGGGAAdTdT | 2047 | 2823-2841 | UUCCCUUUUGACACCUUCUdTdT | 2614 |
| AD-61895.1 | UGUCAAAAGGGAAAGCUAUdTdT | 2048 | 2829-2847 | AUAGCUUUCCCUUUUGACAdTdT | 2615 |
| AD-61901.1 | GCUAUUCUGGUGUUACUUUdTdT | 2049 | 2843-2861 | AAAGUAACACCAGAAUAGCdTdT | 2616 |
| AD-61907.1 | GUGUUACUUUGGAUCCUAGdTdT | 2050 | 2852-2870 | CUAGGAUCCAAAGUAACACdTdT | 2617 |
| AD-61913.1 | GGAUCCUAGGGGUAUUUAUdTdT | 2051 | 2862-2880 | AUAAAUACCCCUAGGAUCCdTdT | 2618 |
| AD-61919.1 | GGUAUUUAUGGUACCAUUAdTdT | 2052 | 2872-2890 | UAAUGGUACCAUAAAUACCdTdT | 2619 |
| AD-61878.1 | GUACCAUUAGCAGACGAAAdTdT | 2053 | 2882-2900 | UUUCGUCUGCUAAUGGUACdTdT | 2620 |
| AD-61884.1 | CAGACGAAAGGAGUUCCCAdTdT | 2054 | 2892-2910 | UGGGAACUCCUUUCGUCUGdTdT | 2621 |
| AD-61890.1 | AGGAGUUCCCAUACAGGAUdTdT | 2055 | 2900-2918 | AUCCUGUAUGGGAACUCCUdTdT | 2622 |
| AD-61896.1 | CAUACAGGAUACCCUUAGAdTdT | 2056 | 2909-2927 | UCUAAGGGUAUCCUGUAUGdTdT | 2623 |
| AD-61902.1 | CUUAGAUUUGGUCCCCAAAdTdT | 2057 | 2922-2940 | UUUGGGGACCAAAUCUAAGdTdT | 2624 |
| AD-61908.1 | UCCCCAAAACAGAAAUCAAdTdT | 2058 | 2933-2951 | UUGAUUUCUGUUUUGGGGAdTdT | 2625 |
| AD-61914.1 | ACAGAAAUCAAAAGGAUUUdTdT | 2059 | 2941-2959 | AAAUCCUUUUGAUUUCUGUdTdT | 2626 |
| AD-61920.1 | AAAGGAUUUUGAGUGUAAAdTdT | 2060 | 2951-2969 | UUUACACUCAAAAUCCUUUdTdT | 2627 |
| AD-61879.1 | AGUGUAAAAGGACUGCUUGdTdT | 2061 | 2962-2980 | CAAGCAGUCCUUUUACACUdTdT | 2628 |
| AD-61885.1 | AAGGACUGCUUGUAGGUGAdTdT | 2062 | 2969-2987 | UCACCUACAAGCAGUCCUUdTdT | 2629 |
| AD-61891.1 | GUAGGUGAGAUCUUGUCUGdTdT | 2063 | 2980-2998 | CAGACAAGAUCUCACCUACdTdT | 2630 |
| AD-61897.1 | AUCUUGUCUGCAGUUCUAAdTdT | 2064 | 2989-3007 | UUAGAACUGCAGACAAGAUdTdT | 2631 |
| AD-61903.1 | GUUCUAAGUCAGGAAGGCAdTdT | 2065 | 3001-3019 | UGCCUUCCUGACUUAGAACdTdT | 2632 |
| AD-61909.1 | GAAGGCAUCAAUAUCCUAAdTdT | 2066 | 3013-3031 | UUAGGAUAUUGAUGCCUUCdTdT | 2633 |
| AD-61915.1 | UCAAUAUCCUAACCCACCUdTdT | 2067 | 3020-3038 | AGGUGGGUUAGGAUAUUGAdTdT | 2634 |
| AD-61921.1 | CCACCUCCCCAAAGGGAGUdTdT | 2068 | 3033-3051 | ACUCCCUUUGGGGAGGUGGdTdT | 2635 |
| AD-61927.1 | CCCCAAAGGGAGUGCAGAGdTdT | 2069 | 3039-3057 | CUCUGCACUCCCUUUGGGGdTdT | 2636 |
| AD-61933.1 | GUGCAGAGGCGGAGCUGAUdTdT | 2070 | 3050-3068 | AUCAGCUCCGCCUCUGCACdTdT | 2637 |
| AD-61939.1 | GGAGCUGAUGAGCGUUGUCdTdT | 2071 | 3060-3078 | GACAACGCUCAUCAGCUCCdTdT | 2638 |
| AD-61945.1 | CGUUGUCCCAGUAUUCUAUdTdT | 2072 | 3072-3090 | AUAGAAUACUGGGACAACGdTdT | 2639 |
| AD-61951.1 | CCAGUAUUCUAUGUUUUUCdTdT | 2073 | 3079-3097 | GAAAAACAUAGAAUACUGGdTdT | 2640 |
| AD-61957.1 | GUUUUUCACUACCUGGAAAdTdT | 2074 | 3091-3109 | UUUCCAGGUAGUGAAAAACdTdT | 2641 |
| AD-61963.1 | CCUGGAAACAGGAAAUCAUdTdT | 2075 | 3102-3120 | AUGAUUUCCUGUUUCCAGGdTdT | 2642 |
| AD-61922.1 | GGAACAUUUUUCAUUCUGAdTdT | 2076 | 3122-3140 | UCAGAAUGAAAAAUGUUCCdTdT | 2643 |
| AD-61928.1 | CAUUCUGACCCAUUAAUUGdTdT | 2077 | 3133-3151 | CAAUUAAUGGGUCAGAAUGdTdT | 2644 |
| AD-61934.1 | CCAUUAAUUGAAAAGCAGAdTdT | 2078 | 3142-3160 | UCUGCUUUUCAAUUAAUGGdTdT | 2645 |
| AD-61940.1 | AAAGCAGAAACUGAAGAAAdTdT | 2079 | 3153-3171 | UUUCUUCAGUUUCUGCUUUdTdT | 2646 |
| AD-61946.1 | AACUGAAGAAAAAAUUAAAdTdT | 2080 | 3161-3179 | UUUAAUUUUUUCUUCAGUUdTdT | 2647 |
| AD-61952.1 | AAAAAAUUAAAAGAAGGGAdTdT | 2081 | 3169-3187 | UCCCUUCUUUUAAUUUUUUdTdT | 2648 |
| AD-61958.1 | AGGGAUGUUGAGCAUUAUGdTdT | 2082 | 3183-3201 | CAUAAUGCUCAACAUCCCUdTdT | 2649 |
| AD-61964.1 | GAGCAUUAUGUCCUACAGAdTdT | 2083 | 3192-3210 | UCUGUAGGACAUAAUGCUCdTdT | 2650 |
| AD-61923.1 | UGUCCUACAGAAAUGCUGAdTdT | 2084 | 3200-3218 | UCAGCAUUUCUGUAGGACAdTdT | 2651 |
| AD-61929.1 | AAUGCUGACUACUCUUACAdTdT | 2085 | 3211-3229 | UGUAAGAGUAGUCAGCAUUdTdT | 2652 |
| AD-61935.1 | UACUCUUACAGUGUGUGGAdTdT | 2086 | 3220-3238 | UCCACACACUGUAAGAGUAdTdT | 2653 |
| AD-61941.1 | AGUGUGUGGAAGGGUGGAAdTdT | 2087 | 3229-3247 | UUCCACCCUUCCACACACUdTdT | 2654 |
| AD-61947.1 | GGGUGGAAGUGCUAGCACUdTdT | 2088 | 3240-3258 | AGUGCUAGCACUUCCACCCdTdT | 2655 |
| AD-61953.1 | GCUAGCACUUGGUUAACAGdTdT | 2089 | 3250-3268 | CUGUUAACCAAGUGCUAGCdTdT | 2656 |
| AD-61959.1 | GGUUAACAGCUUUUGCUUUdTdT | 2090 | 3260-3278 | AAAGCAAAAGCUGUUAACCdTdT | 2657 |
| AD-61965.1 | UGCUUUAAGAGUACUUGGAdTdT | 2091 | 3273-3291 | UCCAAGUACUCUUAAAGCAdTdT | 2658 |
| AD-61924.1 | GUACUUGGACAAGUAAAUAdTdT | 2092 | 3283-3301 | UAUUUACUUGUCCAAGUACdTdT | 2659 |
| AD-61930.1 | CAAGUAAAUAAAUACGUAGdTdT | 2093 | 3292-3310 | CUACGUAUUUAUUUACUUGdTdT | 2660 |
| AD-61936.1 | AUAAAUACGUAGAGCAGAAdTdT | 2094 | 3299-3317 | UUCUGCUCUACGUAUUUAUdTdT | 2661 |
| AD-61942.1 | GAGCAGAACCAAAAUUCAAdTdT | 2095 | 3310-3328 | UUGAAUUUUGGUUCUGCUCdTdT | 2662 |
| AD-61948.1 | AAUUCAAUUUGUAAUUCUUdTdT | 2096 | 3322-3340 | AAGAAUUACAAAUUGAAUUdTdT | 2663 |
| AD-61954.1 | GUAAUUCUUUAUUGUGGCUdTdT | 2097 | 3332-3350 | AGCCACAAUAAAGAAUUACdTdT | 2664 |
| AD-61960.1 | AUUGUGGCUAGUUGAGAAUdTdT | 2098 | 3342-3360 | AUUCUCAACUAGCCACAAUdTdT | 2665 |
| AD-61966.1 | CUAGUUGAGAAUUAUCAAUdTdT | 2099 | 3349-3367 | AUUGAUAAUUCUCAACUAGdTdT | 2666 |
| AD-61925.1 | UUAUCAAUUAGAUAAUGGAdTdT | 2100 | 3360-3378 | UCCAUUAUCUAAUUGAUAAdTdT | 2667 |
| AD-61931.1 | AAUGGAUCUUUCAAGGAAAdTdT | 2101 | 3373-3391 | UUUCCUUGAAAGAUCCAUUdTdT | 2668 |
| AD-61937.1 | CUUUCAAGGAAAAUUCACAdTdT | 2102 | 3380-3398 | UGUGAAUUUUCCUUGAAAGdTdT | 2669 |
| AD-61943.1 | AAUUCACAGUAUCAACCAAdTdT | 2103 | 3391-3409 | UUGGUUGAUACUGUGAAUUdTdT | 2670 |
| AD-61949.1 | GUAUCAACCAAUAAAAUUAdTdT | 2104 | 3399-3417 | UAAUUUUAUUGGUUGAUACdTdT | 2671 |
| AD-61955.1 | AAAAUUACAGGGUACCUUGdTdT | 2105 | 3411-3429 | CAAGGUACCCUGUAAUUUUdTdT | 2672 |
| AD-61961.1 | AGGGUACCUUGCCUGUUGAdTdT | 2106 | 3419-3437 | UCAACAGGCAAGGUACCCUdTdT | 2673 |
| AD-61967.1 | GUUGAAGCCCGAGAGAACAdTdT | 2107 | 3433-3451 | UGUUCUCUCGGGCUUCAACdTdT | 2674 |
| AD-61926.1 | CCGAGAGAACAGCUUAUAUdTdT | 2108 | 3441-3459 | AUAUAAGCUGUUCUCUCGGdTdT | 2675 |
| AD-61932.1 | GCUUAUAUCUUACAGCCUUdTdT | 2109 | 3452-3470 | AAGGCUGUAAGAUAUAAGCdTdT | 2676 |
| AD-61938.1 | CUUACAGCCUUUACUGUGAdTdT | 2110 | 3460-3478 | UCACAGUAAAGGCUGUAAGdTdT | 2677 |
| AD-61944.1 | GAAUUAGAAAGGCUUUCGAdTdT | 2111 | 3482-3500 | UCGAAAGCCUUUCUAAUUCdTdT | 2678 |
| AD-61950.1 | GGCUUUCGAUAUAUGCCCCdTdT | 2112 | 3492-3510 | GGGGCAUAUAUCGAAAGCCdTdT | 2679 |
| AD-61956.1 | GAUAUAUGCCCCCUGGUGAdTdT | 2113 | 3499-3517 | UCACCAGGGGGCAUAUAUCdTdT | 2680 |
| AD-61962.1 | GGUGAAAAUCGACACAGCUdTdT | 2114 | 3513-3531 | AGCUGUGUCGAUUUUCACCdTdT | 2681 |
| AD-61968.1 | CGACACAGCUCUAAUUAAAdTdT | 2115 | 3522-3540 | UUUAAUUAGAGCUGUGUCGdTdT | 2682 |
| AD-61974.1 | GCUCUAAUUAAAGCUGACAdTdT | 2116 | 3529-3547 | UGUCAGCUUUAAUUAGAGCdTdT | 2683 |
| AD-61980.1 | CUGACAACUUUCUGCUUGAdTdT | 2117 | 3542-3560 | UCAAGCAGAAAGUUGUCAGdTdT | 2684 |
| AD-61986.1 | CUUUCUGCUUGAAAAUACAdTdT | 2118 | 3549-3567 | UGUAUUUUCAAGCAGAAAGdTdT | 2685 |
| AD-61992.1 | AAAAUACACUGCCAGCCCAdTdT | 2119 | 3560-3578 | UGGGCUGGCAGUGUAUUUUdTdT | 2686 |
| AD-61998.1 | AGCCCAGAGCACCUUUACAdTdT | 2120 | 3573-3591 | UGUAAAGGUGCUCUGGGCUdTdT | 2687 |
| AD-62004.1 | GCACCUUUACAUUGGCCAUdTdT | 2121 | 3581-3599 | AUGGCCAAUGUAAAGGUGCdTdT | 2688 |
| AD-62010.1 | ACAUUGGCCAUUUCUGCGUdTdT | 2122 | 3589-3607 | ACGCAGAAAUGGCCAAUGUdTdT | 2689 |
| AD-61969.1 | CUGCGUAUGCUCUUUCCCUdTdT | 2123 | 3602-3620 | AGGGAAAGAGCAUACGCAGdTdT | 2690 |
| AD-61975.1 | CUUUCCCUGGGAGAUAAAAdTdT | 2124 | 3613-3631 | UUUUAUCUCCCAGGGAAAGdTdT | 2691 |
| AD-61981.1 | GAGAUAAAACUCACCCACAdTdT | 2125 | 3623-3641 | UGUGGGUGAGUUUUAUCUCdTdT | 2692 |
| AD-61987.1 | ACUCACCCACAGUUUCGUUdTdT | 2126 | 3631-3649 | AACGAAACUGUGGGUGAGUdTdT | 2693 |
| AD-61993.1 | CAGUUUCGUUCAAUUGUUUdTdT | 2127 | 3640-3658 | AAACAAUUGAACGAAACUGdTdT | 2694 |
| AD-61999.1 | CAAUUGUUUCAGCUUUGAAdTdT | 2128 | 3650-3668 | UUCAAAGCUGAAACAAUUGdTdT | 2695 |
| AD-62005.1 | CUUUGAAGAGAGAAGCUUUdTdT | 2129 | 3662-3680 | AAAGCUUCUCUCUUCAAAGdTdT | 2696 |
| AD-62011.1 | GAGAGAAGCUUUGGUUAAAdTdT | 2130 | 3669-3687 | UUUAACCAAAGCUUCUCUCdTdT | 2697 |
| AD-61970.1 | GUUAAAGGUAAUCCACCCAdTdT | 2131 | 3682-3700 | UGGGUGGAUUACCUUUAACdTdT | 2698 |
| AD-61976.1 | AAUCCACCCAUUUAUCGUUdTdT | 2132 | 3691-3709 | AACGAUAAAUGGGUGGAUUdTdT | 2699 |
| AD-61982.1 | CAUUUAUCGUUUUUGGAAAdTdT | 2133 | 3699-3717 | UUUCCAAAAACGAUAAAUGdTdT | 2700 |
| AD-61988.1 | UUUGGAAAGACAAUCUUCAdTdT | 2134 | 3710-3728 | UGAAGAUUGUCUUUCCAAAdTdT | 2701 |
| AD-61994.1 | AAUCUUCAGCAUAAAGACAdTdT | 2135 | 3721-3739 | UGUCUUUAUGCUGAAGAUUdTdT | 2702 |
| AD-62006.1 | CUCUGUACCUAACACUGGUdTdT | 2136 | 3741-3759 | ACCAGUGUUAGGUACAGAGdTdT | 2703 |
| AD-62012.1 | ACACUGGUACGGCACGUAUdTdT | 2137 | 3752-3770 | AUACGUGCCGUACCAGUGUdTdT | 2704 |
| AD-61971.1 | GGCACGUAUGGUAGAAACAdTdT | 2138 | 3762-3780 | UGUUUCUACCAUACGUGCCdTdT | 2705 |
| AD-61977.1 | GGUAGAAACAACUGCCUAUdTdT | 2139 | 3771-3789 | AUAGGCAGUUGUUUCUACCdTdT | 2706 |
| AD-61983.1 | CAACUGCCUAUGCUUUACUdTdT | 2140 | 3779-3797 | AGUAAAGCAUAGGCAGUUGdTdT | 2707 |
| AD-61989.1 | CUUUACUCACCAGUCUGAAdTdT | 2141 | 3791-3809 | UUCAGACUGGUGAGUAAAGdTdT | 2708 |
| AD-61995.1 | GUCUGAACUUGAAAGAUAUdTdT | 2142 | 3803-3821 | AUAUCUUUCAAGUUCAGACdTdT | 2709 |
| AD-62001.1 | ACUUGAAAGAUAUAAAUUAdTdT | 2143 | 3809-3827 | UAAUUUAUAUCUUUCAAGUdTdT | 2710 |
| AD-62007.1 | UAUAAAUUAUGUUAACCCAdTdT | 2144 | 3819-3837 | UGGGUUAACAUAAUUUAUAdTdT | 2711 |
| AD-62013.1 | GUUAACCCAGUCAUCAAAUdTdT | 2145 | 3829-3847 | AUUUGAUGACUGGGUUAACdTdT | 2712 |
| AD-61972.1 | UCAUCAAAUGGCUAUCAGAdTdT | 2146 | 3839-3857 | UCUGAUAGCCAUUUGAUGAdTdT | 2713 |
| AD-61978.1 | UAUCAGAAGAGCAGAGGUAdTdT | 2147 | 3851-3869 | UACCUCUGCUCUUCUGAUAdTdT | 2714 |
| AD-61984.1 | AGAGGUAUGGAGGUGGCUUdTdT | 2148 | 3863-3881 | AAGCCACCUCCAUACCUCUdTdT | 2715 |
| AD-61990.1 | GAGGUGGCUUUUAUUCAACdTdT | 2149 | 3872-3890 | GUUGAAUAAAAGCCACCUCdTdT | 2716 |
| AD-61996.1 | UAUUCAACCCAGGACACAAdTdT | 2150 | 3883-3901 | UUGUGUCCUGGGUUGAAUAdTdT | 2717 |
| AD-62002.1 | AGGACACAAUCAAUGCCAUdTdT | 2151 | 3893-3911 | AUGGCAUUGAUUGUGUCCUdTdT | 2718 |
| AD-62008.1 | CAAUCAAUGCCAUUGAGGGdTdT | 2152 | 3899-3917 | CCCUCAAUGGCAUUGAUUGdTdT | 2719 |
| AD-62014.1 | CAUUGAGGGCCUGACGGAAdTdT | 2153 | 3909-3927 | UUCCGUCAGGCCCUCAAUGdTdT | 2720 |
| AD-61973.1 | ACGGAAUAUUCACUCCUGGdTdT | 2154 | 3922-3940 | CCAGGAGUGAAUAUUCCGUdTdT | 2721 |
| AD-61979.1 | UUCACUCCUGGUUAAACAAdTdT | 2155 | 3930-3948 | UUGUUUAACCAGGAGUGAAdTdT | 2722 |
| AD-61985.1 | GGUUAAACAACUCCGCUUGdTdT | 2156 | 3939-3957 | CAAGCGGAGUUGUUUAACCdTdT | 2723 |
| AD-61991.1 | CCGCUUGAGUAUGGACAUCdTdT | 2157 | 3951-3969 | GAUGUCCAUACUCAAGCGGdTdT | 2724 |
| AD-61997.1 | GGACAUCGAUGUUUCUUACdTdT | 2158 | 3963-3981 | GUAAGAAACAUCGAUGUCCdTdT | 2725 |
| AD-62003.1 | CGAUGUUUCUUACAAGCAUdTdT | 2159 | 3969-3987 | AUGCUUGUAAGAAACAUCGdTdT | 2726 |
| AD-62009.1 | CAAGCAUAAAGGUGCCUUAdTdT | 2160 | 3981-3999 | UAAGGCACCUUUAUGCUUGdTdT | 2727 |
| AD-62056.1 | GUGCCUUACAUAAUUAUAAdTdT | 2161 | 3992-4010 | UUAUAAUUAUGUAAGGCACdTdT | 2728 |
| AD-62015.1 | ACAUAAUUAUAAAAUGACAdTdT | 2162 | 3999-4017 | UGUCAUUUUAUAAUUAUGUdTdT | 2729 |
| AD-62021.1 | AAAAUGACAGACAAGAAUUdTdT | 2163 | 4009-4027 | AAUUCUUGUCUGUCAUUUUdTdT | 2730 |
| AD-62027.1 | CAAGAAUUUCCUUGGGAGGdTdT | 2164 | 4020-4038 | CCUCCCAAGGAAAUUCUUGdTdT | 2731 |
| AD-62033.1 | CCUUGGGAGGCCAGUAGAGdTdT | 2165 | 4029-4047 | CUCUACUGGCCUCCCAAGGdTdT | 2732 |
| AD-62039.1 | AGUAGAGGUGCUUCUCAAUdTdT | 2166 | 4041-4059 | AUUGAGAAGCACCUCUACUdTdT | 2733 |
| AD-62045.1 | CUUCUCAAUGAUGACCUCAdTdT | 2167 | 4051-4069 | UGAGGUCAUCAUUGAGAAGdTdT | 2734 |
| AD-62051.1 | UGACCUCAUUGUCAGUACAdTdT | 2168 | 4062-4080 | UGUACUGACAAUGAGGUCAdTdT | 2735 |
| AD-62057.1 | GUCAGUACAGGAUUUGGCAdTdT | 2169 | 4072-4090 | UGCCAAAUCCUGUACUGACdTdT | 2736 |
| AD-62016.1 | AGGAUUUGGCAGUGGCUUGdTdT | 2170 | 4080-4098 | CAAGCCACUGCCAAAUCCUdTdT | 2737 |
| AD-62022.1 | UGGCUUGGCUACAGUACAUdTdT | 2171 | 4092-4110 | AUGUACUGUAGCCAAGCCAdTdT | 2738 |
| AD-62028.1 | GCUACAGUACAUGUAACAAdTdT | 2172 | 4099-4117 | UUGUUACAUGUACUGUAGCdTdT | 2739 |
| AD-62034.1 | AACAACUGUAGUUCACAAAdTdT | 2173 | 4113-4131 | UUUGUGAACUACAGUUGUUdTdT | 2740 |
| AD-62040.1 | GUAGUUCACAAAACCAGUAdTdT | 2174 | 4120-4138 | UACUGGUUUUGUGAACUACdTdT | 2741 |
| AD-62046.1 | AAACCAGUACCUCUGAGGAdTdT | 2175 | 4130-4148 | UCCUCAGAGGUACUGGUUUdTdT | 2742 |
| AD-62052.1 | UGAGGAAGUUUGCAGCUUUdTdT | 2176 | 4143-4161 | AAAGCUGCAAACUUCCUCAdTdT | 2743 |
| AD-62058.1 | UGCAGCUUUUAUUUGAAAAdTdT | 2177 | 4153-4171 | UUUUCAAAUAAAAGCUGCAdTdT | 2744 |
| AD-62017.1 | AUUUGAAAAUCGAUACUCAdTdT | 2178 | 4163-4181 | UGAGUAUCGAUUUUCAAAUdTdT | 2745 |
| AD-62023.1 | CGAUACUCAGGAUAUUGAAdTdT | 2179 | 4173-4191 | UUCAAUAUCCUGAGUAUCGdTdT | 2746 |
| AD-62029.1 | GGAUAUUGAAGCAUCCCACdTdT | 2180 | 4182-4200 | GUGGGAUGCUUCAAUAUCCdTdT | 2747 |
| AD-62035.1 | GAAGCAUCCCACUACAGAGdTdT | 2181 | 4189-4207 | CUCUGUAGUGGGAUGCUUCdTdT | 2748 |
| AD-62041.1 | ACUACAGAGGCUACGGAAAdTdT | 2182 | 4199-4217 | UUUCCGUAGCCUCUGUAGUdTdT | 2749 |
| AD-62047.1 | CGGAAACUCUGAUUACAAAdTdT | 2183 | 4212-4230 | UUUGUAAUCAGAGUUUCCGdTdT | 2750 |
| AD-62053.1 | UGAUUACAAACGCAUAGUAdTdT | 2184 | 4221-4239 | UACUAUGCGUUUGUAAUCAdTdT | 2751 |
| AD-62059.1 | GCAUAGUAGCAUGUGCCAGdTdT | 2185 | 4232-4250 | CUGGCACAUGCUACUAUGCdTdT | 2752 |
| AD-62018.1 | GCAUGUGCCAGCUACAAGCdTdT | 2186 | 4240-4258 | GCUUGUAGCUGGCACAUGCdTdT | 2753 |
| AD-62024.1 | CUACAAGCCCAGCAGGGAAdTdT | 2187 | 4251-4269 | UUCCCUGCUGGGCUUGUAGdTdT | 2754 |
| AD-62030.1 | CAGCAGGGAAGAAUCAUCAdTdT | 2188 | 4260-4278 | UGAUGAUUCUUCCCUGCUGdTdT | 2755 |
| AD-62036.1 | GAAUCAUCAUCUGGAUCCUdTdT | 2189 | 4270-4288 | AGGAUCCAGAUGAUGAUUCdTdT | 2756 |
| AD-62042.1 | GAUCCUCUCAUGCGGUGAUdTdT | 2190 | 4283-4301 | AUCACCGCAUGAGAGGAUCdTdT | 2757 |
| AD-62048.1 | CUCAUGCGGUGAUGGACAUdTdT | 2191 | 4289-4307 | AUGUCCAUCACCGCAUGAGdTdT | 2758 |
| AD-62054.1 | GAUGGACAUCUCCUUGCCUdTdT | 2192 | 4299-4317 | AGGCAAGGAGAUGUCCAUCdTdT | 2759 |
| AD-62060.1 | CUUGCCUACUGGAAUCAGUdTdT | 2193 | 4311-4329 | ACUGAUUCCAGUAGGCAAGdTdT | 2760 |
| AD-62019.1 | GAAUCAGUGCAAAUGAAGAdTdT | 2194 | 4322-4340 | UCUUCAUUUGCACUGAUUCdTdT | 2761 |
| AD-62025.1 | AAAUGAAGAAGACUUAAAAdTdT | 2195 | 4332-4350 | UUUUAAGUCUUCUUCAUUUdTdT | 2762 |
| AD-62031.1 | GAAGACUUAAAAGCCCUUGdTdT | 2196 | 4339-4357 | CAAGGGCUUUUAAGUCUUCdTdT | 2763 |
| AD-62037.1 | CCUUGUGGAAGGGGUGGAUdTdT | 2197 | 4353-4371 | AUCCACCCCUUCCACAAGGdTdT | 2764 |
| AD-62043.1 | GAAGGGGUGGAUCAACUAUdTdT | 2198 | 4360-4378 | AUAGUUGAUCCACCCCUUCdTdT | 2765 |
| AD-62049.1 | AUCAACUAUUCACUGAUUAdTdT | 2199 | 4370-4388 | UAAUCAGUGAAUAGUUGAUdTdT | 2766 |
| AD-62055.1 | CACUGAUUACCAAAUCAAAdTdT | 2200 | 4380-4398 | UUUGAUUUGGUAAUCAGUGdTdT | 2767 |
| AD-62061.1 | AUCAAAGAUGGACAUGUUAdTdT | 2201 | 4393-4411 | UAACAUGUCCAUCUUUGAUdTdT | 2768 |
| AD-62020.1 | GGACAUGUUAUUCUGCAACdTdT | 2202 | 4402-4420 | GUUGCAGAAUAACAUGUCCdTdT | 2769 |
| AD-62026.1 | UCUGCAACUGAAUUCGAUUdTdT | 2203 | 4413-4431 | AAUCGAAUUCAGUUGCAGAdTdT | 2770 |
| AD-62032.1 | GAAUUCGAUUCCCUCCAGUdTdT | 2204 | 4422-4440 | ACUGGAGGGAAUCGAAUUCdTdT | 2771 |
| AD-62038.1 | CCCUCCAGUGAUUUCCUUUdTdT | 2205 | 4432-4450 | AAAGGAAAUCACUGGAGGGdTdT | 2772 |
| AD-62044.1 | GAUUUCCUUUGUGUACGAUdTdT | 2206 | 4441-4459 | AUCGUACACAAAGGAAAUCdTdT | 2773 |
| AD-62050.1 | GUACGAUUCCGGAUAUUUGdTdT | 2207 | 4453-4471 | CAAAUAUCCGGAAUCGUACdTdT | 2774 |
| AD-62320.1 | CGGAUAUUUGAACUCUUUGdTdT | 2208 | 4462-4480 | CAAAGAGUUCAAAUAUCCGdTdT | 2775 |
| AD-62326.1 | ACUCUUUGAAGUUGGGUUUdTdT | 2209 | 4473-4491 | AAACCCAACUUCAAAGAGUdTdT | 2776 |
| AD-62332.1 | AGUUGGGUUUCUCAGUCCUdTdT | 2210 | 4482-4500 | AGGACUGAGAAACCCAACUdTdT | 2777 |
| AD-62338.1 | UUCUCAGUCCUGCCACUUUdTdT | 2211 | 4490-4508 | AAAGUGGCAGGACUGAGAAdTdT | 2778 |
| AD-62344.1 | CACUUUCACAGUGUACGAAdTdT | 2212 | 4503-4521 | UUCGUACACUGUGAAAGUGdTdT | 2779 |
| AD-62350.1 | CACAGUGUACGAAUACCACdTdT | 2213 | 4509-4527 | GUGGUAUUCGUACACUGUGdTdT | 2780 |
| AD-62356.1 | ACCACAGACCAGAUAAACAdTdT | 2214 | 4523-4541 | UGUUUAUCUGGUCUGUGGUdTdT | 2781 |
| AD-62362.1 | CCAGAUAAACAGUGUACCAdTdT | 2215 | 4531-4549 | UGGUACACUGUUUAUCUGGdTdT | 2782 |
| AD-62321.1 | CAGUGUACCAUGUUUUAUAdTdT | 2216 | 4540-4558 | UAUAAAACAUGGUACACUGdTdT | 2783 |
| AD-62327.1 | GUUUUAUAGCACUUCCAAUdTdT | 2217 | 4551-4569 | AUUGGAAGUGCUAUAAAACdTdT | 2784 |
| AD-62333.1 | CUUCCAAUAUCAAAAUUCAdTdT | 2218 | 4562-4580 | UGAAUUUUGAUAUUGGAAGdTdT | 2785 |
| AD-62339.1 | AUCAAAAUUCAGAAAGUCUdTdT | 2219 | 4570-4588 | AGACUUUCUGAAUUUUGAUdTdT | 2786 |
| AD-62345.1 | GAAAGUCUGUGAAGGAGCCdTdT | 2220 | 4581-4599 | GGCUCCUUCACAGACUUUCdTdT | 2787 |
| AD-62351.1 | GAAGGAGCCGCGUGCAAGUdTdT | 2221 | 4591-4609 | ACUUGCACGCGGCUCCUUCdTdT | 2788 |
| AD-62357.1 | CGUGCAAGUGUGUAGAAGCdTdT | 2222 | 4601-4619 | GCUUCUACACACUUGCACGdTdT | 2789 |
| AD-62363.1 | GUAGAAGCUGAUUGUGGGCdTdT | 2223 | 4612-4630 | GCCCACAAUCAGCUUCUACdTdT | 2790 |
| AD-62322.1 | CUGAUUGUGGGCAAAUGCAdTdT | 2224 | 4619-4637 | UGCAUUUGCCCACAAUCAGdTdT | 2791 |
| AD-62328.1 | GCAAAUGCAGGAAGAAUUGdTdT | 2225 | 4629-4647 | CAAUUCUUCCUGCAUUUGCdTdT | 2792 |
| AD-62334.1 | GAAGAAUUGGAUCUGACAAdTdT | 2226 | 4639-4657 | UUGUCAGAUCCAAUUCUUCdTdT | 2793 |
| AD-62340.1 | CUGACAAUCUCUGCAGAGAdTdT | 2227 | 4651-4669 | UCUCUGCAGAGAUUGUCAGdTdT | 2794 |
| AD-62346.1 | GCAGAGACAAGAAAACAAAdTdT | 2228 | 4663-4681 | UUUGUUUUCUUGUCUCUGCdTdT | 2795 |
| AD-62352.1 | CAAGAAAACAAACAGCAUGdTdT | 2229 | 4670-4688 | CAUGCUGUUUGUUUUCUUGdTdT | 2796 |
| AD-62358.1 | ACAGCAUGUAAACCAGAGAdTdT | 2230 | 4681-4699 | UCUCUGGUUUACAUGCUGUdTdT | 2797 |
| AD-62364.1 | CCAGAGAUUGCAUAUGCUUdTdT | 2231 | 4693-4711 | AAGCAUAUGCAAUCUCUGGdTdT | 2798 |
| AD-62323.1 | GCAUAUGCUUAUAAAGUUAdTdT | 2232 | 4702-4720 | UAACUUUAUAAGCAUAUGCdTdT | 2799 |
| AD-62329.1 | UUAUAAAGUUAGCAUCACAdTdT | 2233 | 4710-4728 | UGUGAUGCUAACUUUAUAAdTdT | 2800 |
| AD-62335.1 | CAUCACAUCCAUCACUGUAdTdT | 2234 | 4722-4740 | UACAGUGAUGGAUGUGAUGdTdT | 2801 |
| AD-62341.1 | UCACUGUAGAAAAUGUUUUdTdT | 2235 | 4733-4751 | AAAACAUUUUCUACAGUGAdTdT | 2802 |
| AD-62347.1 | AGAAAAUGUUUUUGUCAAGdTdT | 2236 | 4740-4758 | CUUGACAAAAACAUUUUCUdTdT | 2803 |
| AD-62353.1 | UUUGUCAAGUACAAGGCAAdTdT | 2237 | 4750-4768 | UUGCCUUGUACUUGACAAAdTdT | 2804 |
| AD-62359.1 | AGGCAACCCUUCUGGAUAUdTdT | 2238 | 4763-4781 | AUAUCCAGAAGGGUUGCCUdTdT | 2805 |
| AD-62365.1 | CCUUCUGGAUAUCUACAAAdTdT | 2239 | 4770-4788 | UUUGUAGAUAUCCAGAAGGdTdT | 2806 |
| AD-62324.1 | UAUCUACAAAACUGGGGAAdTdT | 2240 | 4779-4797 | UUCCCCAGUUUUGUAGAUAdTdT | 2807 |
| AD-62330.1 | CUGGGGAAGCUGUUGCUGAdTdT | 2241 | 4790-4808 | UCAGCAACAGCUUCCCCAGdTdT | 2808 |
| AD-62336.1 | CUGUUGCUGAGAAAGACUCdTdT | 2242 | 4799-4817 | GAGUCUUUCUCAGCAACAGdTdT | 2809 |
| AD-62342.1 | GACUCUGAGAUUACCUUCAdTdT | 2243 | 4813-4831 | UGAAGGUAAUCUCAGAGUCdTdT | 2810 |
| AD-62348.1 | GAGAUUACCUUCAUUAAAAdTdT | 2244 | 4819-4837 | UUUUAAUGAAGGUAAUCUCdTdT | 2811 |
| AD-62354.1 | AUUAAAAAGGUAACCUGUAdTdT | 2245 | 4831-4849 | UACAGGUUACCUUUUUAAUdTdT | 2812 |
| AD-62360.1 | UAACCUGUACUAACGCUGAdTdT | 2246 | 4841-4859 | UCAGCGUUAGUACAGGUUAdTdT | 2813 |
| AD-62366.1 | CUAACGCUGAGCUGGUAAAdTdT | 2247 | 4850-4868 | UUUACCAGCUCAGCGUUAGdTdT | 2814 |
| AD-62325.1 | GGUAAAAGGAAGACAGUACdTdT | 2248 | 4863-4881 | GUACUGUCUUCCUUUUACCdTdT | 2815 |
| AD-62331.1 | GAAGACAGUACUUAAUUAUdTdT | 2249 | 4871-4889 | AUAAUUAAGUACUGUCUUCdTdT | 2816 |
| AD-62337.1 | CUUAAUUAUGGGUAAAGAAdTdT | 2250 | 4881-4899 | UUCUUUACCCAUAAUUAAGdTdT | 2817 |
| AD-62343.1 | UAAAGAAGCCCUCCAGAUAdTdT | 2251 | 4893-4911 | UAUCUGGAGGGCUUCUUUAdTdT | 2818 |
| AD-62349.1 | CCUCCAGAUAAAAUACAAUdTdT | 2252 | 4902-4920 | AUUGUAUUUUAUCUGGAGGdTdT | 2819 |
| AD-62355.1 | AAAUACAAUUUCAGUUUCAdTdT | 2253 | 4912-4930 | UGAAACUGAAAUUGUAUUUdTdT | 2820 |
| AD-62361.1 | CAGUUUCAGGUACAUCUACdTdT | 2254 | 4923-4941 | GUAGAUGUACCUGAAACUGdTdT | 2821 |
| AD-62367.1 | GGUACAUCUACCCUUUAGAdTdT | 2255 | 4931-4949 | UCUAAAGGGUAGAUGUACCdTdT | 2822 |
| AD-62373.1 | CCUUUAGAUUCCUUGACCUdTdT | 2256 | 4942-4960 | AGGUCAAGGAAUCUAAAGGdTdT | 2823 |
| AD-62379.1 | CCUUGACCUGGAUUGAAUAdTdT | 2257 | 4952-4970 | UAUUCAAUCCAGGUCAAGGdTdT | 2824 |
| AD-62385.1 | GGAUUGAAUACUGGCCUAGdTdT | 2258 | 4961-4979 | CUAGGCCAGUAUUCAAUCCdTdT | 2825 |
| AD-62391.1 | CUGGCCUAGAGACACAACAdTdT | 2259 | 4971-4989 | UGUUGUGUCUCUAGGCCAGdTdT | 2826 |
| AD-62397.1 | GAGACACAACAUGUUCAUCdTdT | 2260 | 4979-4997 | GAUGAACAUGUUGUGUCUCdTdT | 2827 |
| AD-62403.1 | GUUCAUCGUGUCAAGCAUUdTdT | 2261 | 4991-5009 | AAUGCUUGACACGAUGAACdTdT | 2828 |
| AD-62409.1 | GUCAAGCAUUUUUAGCUAAdTdT | 2262 | 5000-5018 | UUAGCUAAAAAUGCUUGACdTdT | 2829 |
| AD-62368.1 | AGCUAAUUUAGAUGAAUUUdTdT | 2263 | 5013-5031 | AAAUUCAUCUAAAUUAGCUdTdT | 2830 |
| AD-62374.1 | AGAUGAAUUUGCCGAAGAUdTdT | 2264 | 5022-5040 | AUCUUCGGCAAAUUCAUCUdTdT | 2831 |
| AD-62380.1 | CCGAAGAUAUCUUUUUAAAdTdT | 2265 | 5033-5051 | UUUAAAAAGAUAUCUUCGGdTdT | 2832 |
| AD-62386.1 | CUUUUUAAAUGGAUGCUAAdTdT | 2266 | 5043-5061 | UUAGCAUCCAUUUAAAAAGdTdT | 2833 |
| AD-62392.1 | GGAUGCUAAAAUUCCUGAAdTdT | 2267 | 5053-5071 | UUCAGGAAUUUUAGCAUCCdTdT | 2834 |
| AD-62398.1 | UAAAAUUCCUGAAGUUCAGdTdT | 2268 | 5059-5077 | CUGAACUUCAGGAAUUUUAdTdT | 2835 |
| AD-62404.1 | AGUUCAGCUGCAUACAGUUdTdT | 2269 | 5071-5089 | AACUGUAUGCAGCUGAACUdTdT | 2836 |
| AD-62410.1 | GCAUACAGUUUGCACUUAUdTdT | 2270 | 5080-5098 | AUAAGUGCAAACUGUAUGCdTdT | 2837 |
| AD-62369.1 | ACUUAUGGACUCCUGUUGUdTdT | 2271 | 5093-5111 | ACAACAGGAGUCCAUAAGUdTdT | 2838 |
| AD-62375.1 | GGACUCCUGUUGUUGAAGUdTdT | 2272 | 5099-5117 | ACUUCAACAACAGGAGUCCdTdT | 2839 |
| AD-62381.1 | UGUUGAAGUUCGUUUUUUUdTdT | 2273 | 5109-5127 | AAAAAAACGAACUUCAACAdTdT | 2840 |
| AD-62387.1 | UUUUUUGUUUUCUUCUUUUdTdT | 2274 | 5122-5140 | AAAAGAAGAAAACAAAAAAdTdT | 2841 |
| AD-62393.1 | UCUUCUUUUUUUAAACAUUdTdT | 2275 | 5132-5150 | AAUGUUUAAAAAAAGAAGAdTdT | 2842 |
| AD-62399.1 | UUUUUAAACAUUCAUAGCUdTdT | 2276 | 5139-5157 | AGCUAUGAAUGUUUAAAAAdTdT | 2843 |
| AD-62405.1 | AUAGCUGGUCUUAUUUGUAdTdT | 2277 | 5152-5170 | UACAAAUAAGACCAGCUAUdTdT | 2844 |
| AD-62411.1 | GUCUUAUUUGUAAAGCUCAdTdT | 2278 | 5159-5177 | UGAGCUUUACAAAUAAGACdTdT | 2845 |
| AD-62370.1 | AAAGCUCACUUUACUUAGAdTdT | 2279 | 5170-5188 | UCUAAGUAAAGUGAGCUUUdTdT | 2846 |
| AD-62376.1 | ACUUAGAAUUAGUGGCACUdTdT | 2280 | 5182-5200 | AGUGCCACUAAUUCUAAGUdTdT | 2847 |
| AD-62382.1 | AGUGGCACUUGCUUUUAUUdTdT | 2281 | 5192-5210 | AAUAAAAGCAAGUGCCACUdTdT | 2848 |
| AD-62388.1 | GCUUUUAUUAGAGAAUGAUdTdT | 2282 | 5202-5220 | AUCAUUCUCUAAUAAAAGCdTdT | 2849 |
| AD-62394.1 | GAGAAUGAUUUCAAAUGCUdTdT | 2283 | 5212-5230 | AGCAUUUGAAAUCAUUCUCdTdT | 2850 |
| AD-62400.1 | UUUCAAAUGCUGUAACUUUdTdT | 2284 | 5220-5238 | AAAGUUACAGCAUUUGAAAdTdT | 2851 |
| AD-62406.1 | GUAACUUUCUGAAAUAACAdTdT | 2285 | 5231-5249 | UGUUAUUUCAGAAAGUUACdTdT | 2852 |
| AD-62412.1 | GAAAUAACAUGGCCUUGGAdTdT | 2286 | 5241-5259 | UCCAAGGCCAUGUUAUUUCdTdT | 2853 |
| AD-62371.1 | CCUUGGAGGGCAUGAAGACdTdT | 2287 | 5253-5271 | GUCUUCAUGCCCUCCAAGGdTdT | 2854 |
| AD-62377.1 | AGGGCAUGAAGACAGAUACdTdT | 2288 | 5259-5277 | GUAUCUGUCUUCAUGCCCUdTdT | 2855 |
| AD-62383.1 | GAUACUCCUCCAAGGUUAUdTdT | 2289 | 5273-5291 | AUAACCUUGGAGGAGUAUCdTdT | 2856 |
| AD-62389.1 | CCUCCAAGGUUAUUGGACAdTdT | 2290 | 5279-5297 | UGUCCAAUAACCUUGGAGGdTdT | 2857 |
| AD-62395.1 | GGACACCGGAAACAAUAAAdTdT | 2291 | 5293-5311 | UUUAUUGUUUCCGGUGUCCdTdT | 2858 |
| AD-62401.1 | GAAACAAUAAAUUGGAACAdTdT | 2292 | 5301-5319 | UGUUCCAAUUUAUUGUUUCdTdT | 2859 |
| AD-62407.1 | AUUGGAACACCUCCUCAAAdTdT | 2293 | 5311-5329 | UUUGAGGAGGUGUUCCAAUdTdT | 2860 |
| AD-62413.1 | UCCUCAAACCUACCACUCAdTdT | 2294 | 5322-5340 | UGAGUGGUAGGUUUGAGGAdTdT | 2861 |
| AD-62372.1 | CUACCACUCAGGAAUGUUUdTdT | 2295 | 5331-5349 | AAACAUUCCUGAGUGGUAGdTdT | 2862 |
| AD-62378.1 | AAUGUUUGCUGGGGCCGAAdTdT | 2296 | 5343-5361 | UUCGGCCCCAGCAAACAUUdTdT | 2863 |
| AD-62384.1 | UGCUGGGGCCGAAAGAACAdTdT | 2297 | 5349-5367 | UGUUCUUUCGGCCCCAGCAdTdT | 2864 |
| AD-62390.1 | AAAGAACAGUCCAUUGAAAdTdT | 2298 | 5360-5378 | UUUCAAUGGACUGUUCUUUdTdT | 2865 |
| AD-62396.1 | CAUUGAAAGGGAGUAUUACdTdT | 2299 | 5371-5389 | GUAAUACUCCCUUUCAAUGdTdT | 2866 |
| AD-62402.1 | GGAGUAUUACAAAAACAUGdTdT | 2300 | 5380-5398 | CAUGUUUUUGUAAUACUCCdTdT | 2867 |
| AD-62408.1 | AAAACAUGGCCUUUGCUUGdTdT | 2301 | 5391-5409 | CAAGCAAAGGCCAUGUUUUdTdT | 2868 |
| AD-62414.1 | GCCUUUGCUUGAAAGAAAAdTdT | 2302 | 5399-5417 | UUUUCUUUCAAGCAAAGGCdTdT | 2869 |
| AD-62415.1 | GAAAGAAAAUACCAAGGAAdTdT | 2303 | 5409-5427 | UUCCUUGGUAUUUUCUUUCdTdT | 2870 |
| AD-62416.1 | CCAAGGAACAGGAAACUGAdTdT | 2304 | 5420-5438 | UCAGUUUCCUGUUCCUUGGdTdT | 2871 |
| AD-62417.1 | AACUGAUCAUUAAAGCCUGdTdT | 2305 | 5433-5451 | CAGGCUUUAAUGAUCAGUUdTdT | 2872 |

TABLE 22
C5 single dose screen (10 mM) in Hep3B
cells with dT modified iRNAs

| Duplex ID | Avg. % message remaining |
|---|---|
| AD-61779.2 | 43.2 |
| AD-61785.2 | 22.5 |
| AD-61791.2 | 27.3 |
| AD-61797.2 | 30.5 |
| AD-61803.2 | 30.9 |
| AD-61809.2 | 75.1 |
| AD-61815.2 | 90.7 |
| AD-61821.2 | 33.7 |
| AD-61780.2 | 53.5 |
| AD-61786.2 | 34.4 |
| AD-61792.2 | 27.5 |
| AD-61798.2 | 23.3 |
| AD-61804.2 | 23.6 |
| AD-61810.2 | 33.4 |
| AD-61816.2 | 39.7 |
| AD-61822.2 | 24.9 |
| AD-61781.2 | 31.2 |
| AD-61787.2 | 22.8 |
| AD-61793.2 | 28.4 |
| AD-61799.2 | 91 |
| AD-61805.2 | 22.1 |
| AD-61811.2 | 90.9 |
| AD-61817.2 | 26.1 |
| AD-61823.2 | 41.3 |
| AD-61782.2 | 42.5 |
| AD-61788.2 | 28.9 |
| AD-61794.2 | 133.5 |
| AD-61800.2 | 27.9 |
| AD-61806.2 | 42.8 |
| AD-61812.2 | 26.9 |
| AD-61818.2 | 30.6 |
| AD-61824.2 | 29.3 |
| AD-61783.2 | 61.3 |
| AD-61789.2 | 25.5 |
| AD-61795.2 | 34.2 |
| AD-61801.2 | 24.2 |
| AD-61807.2 | 42.8 |
| AD-61813.2 | 31 |
| AD-61819.2 | 42.2 |
| AD-61825.2 | 31 |
| AD-61784.2 | 34.1 |
| AD-61790.2 | 26.8 |
| AD-61796.2 | 34.6 |
| AD-61802.2 | 30 |
| AD-61808.2 | 23.5 |
| AD-61814.2 | 45.3 |
| AD-61820.2 | 56 |
| AD-61826.2 | 31.6 |
| AD-61832.2 | 36.2 |
| AD-61838.2 | 39.7 |
| AD-61844.2 | 37 |
| AD-61850.2 | 66.3 |
| AD-61856.2 | 172.6 |
| AD-61862.2 | 41.3 |
| AD-61868.2 | 32.2 |
| AD-61827.2 | 52.7 |
| AD-61833.2 | 29.6 |
| AD-61839.2 | 41.5 |
| AD-61845.2 | 29.7 |
| AD-61851.2 | 37 |
| AD-61857.2 | 34.9 |
| AD-61863.2 | 33.3 |
| AD-61869.2 | 38.2 |
| AD-61828.2 | 30.3 |
| AD-61834.2 | 27.1 |
| AD-61840.2 | 64.3 |
| AD-61846.2 | 42 |
| AD-61852.2 | 25.2 |
| AD-61858.2 | 96.7 |
| AD-61864.2 | 29.6 |
| AD-61870.2 | 30.5 |
| AD-61829.2 | 92.7 |
| AD-61835.2 | 24.8 |
| AD-61841.2 | 59.2 |
| AD-61847.2 | 30.9 |
| AD-61853.2 | 35.2 |
| AD-61859.2 | 40.1 |
| AD-61865.2 | 42.3 |
| AD-61871.2 | 55.8 |
| AD-61830.2 | 162.9 |
| AD-61836.2 | 28.8 |
| AD-61842.2 | 18.2 |
| AD-61848.2 | 25 |
| AD-61854.2 | 42.3 |
| AD-61860.2 | 41.7 |
| AD-61866.2 | 28.9 |
| AD-61872.2 | 64.7 |
| AD-61831.2 | 16.9 |
| AD-61837.2 | 24.9 |
| AD-61843.2 | 27.5 |
| AD-61849.2 | 25.8 |
| AD-61855.2 | 20 |
| AD-61861.2 | 28.6 |
| AD-61867.2 | 18 |
| AD-62062.1 | 22 |
| AD-62068.1 | 29.9 |
| AD-62074.1 | 40.2 |
| AD-62080.1 | 30.4 |
| AD-62086.1 | 21 |
| AD-62092.1 | 20 |
| AD-62098.1 | 38.4 |
| AD-62104.1 | 42.7 |
| AD-62063.1 | 26.6 |
| AD-62069.1 | 55.6 |
| AD-62075.1 | 114.4 |
| AD-62081.1 | 21.2 |
| AD-62087.1 | 33.8 |
| AD-62093.1 | 26.3 |
| AD-62099.1 | 23.9 |
| AD-62105.1 | 30.1 |
| AD-62064.1 | 32 |
| AD-62070.1 | 135.7 |
| AD-62076.1 | 84.3 |
| AD-62082.1 | 42.3 |
| AD-62088.1 | 36.5 |
| AD-62094.1 | 66 |
| AD-62100.1 | 66.4 |
| AD-62106.1 | 33.9 |
| AD-62065.1 | 33 |
| AD-62071.1 | 38.4 |
| AD-62077.1 | 27.8 |
| AD-62083.1 | 44.7 |
| AD-62089.1 | 42.7 |
| AD-62095.1 | 46.6 |
| AD-62101.1 | 35.3 |
| AD-62107.1 | 29.9 |
| AD-62066.1 | 33.5 |
| AD-62072.1 | 27.5 |
| AD-62078.1 | 49.9 |
| AD-62084.1 | 117.6 |
| AD-62090.1 | 44 |
| AD-62096.1 | 33.5 |
| AD-62102.1 | 39.2 |
| AD-62108.1 | 69.5 |
| AD-62067.1 | 32.3 |
| AD-62073.1 | 81.1 |
| AD-62079.1 | 46.8 |
| AD-62085.1 | 31.6 |
| AD-62091.1 | 32 |
| AD-62097.1 | 35.3 |
| AD-62103.1 | 35.6 |
| AD-62109.1 | 24.7 |
| AD-62115.1 | 25.7 |
| AD-62121.1 | 23.1 |
| AD-62127.1 | 36.3 |
| AD-62133.1 | 50.9 |
| AD-62139.1 | 84.1 |
| AD-62145.1 | 90.8 |
| AD-62151.1 | 56.9 |
| AD-62110.1 | 26 |
| AD-62116.1 | 145.5 |
| AD-62122.1 | 198.7 |
| AD-62128.1 | 178.4 |
| AD-62134.1 | 52.4 |
| AD-62140.1 | 55.6 |
| AD-62146.1 | 47.2 |
| AD-62152.1 | 16.4 |
| AD-62111.1 | 49.3 |
| AD-62117.1 | 46.2 |
| AD-62123.1 | 95.1 |
| AD-62129.1 | 156.2 |
| AD-62135.1 | 62 |
| AD-62141.1 | 128.1 |
| AD-62147.1 | 146.2 |
| AD-62153.1 | 35.5 |
| AD-62112.1 | 43 |
| AD-62118.1 | 32 |
| AD-62124.1 | 48.4 |
| AD-62130.1 | 49.4 |
| AD-62136.1 | 141.9 |
| AD-62142.1 | 38.7 |
| AD-62148.1 | 165.2 |
| AD-62154.1 | 94.7 |
| AD-62113.1 | 52.5 |
| AD-62119.1 | 44 |
| AD-62125.1 | 129.9 |
| AD-62131.1 | 68.9 |
| AD-62137.1 | 106 |
| AD-62143.1 | 176.1 |
| AD-62149.1 | 201.3 |
| AD-62155.1 | 143.3 |
| AD-62114.1 | 22.8 |
| AD-62120.1 | 34.6 |
| AD-62126.1 | 44.6 |
| AD-62132.1 | 39.5 |
| AD-62138.1 | 34.5 |
| AD-62144.1 | 28 |
| AD-62150.1 | 22.1 |
| AD-62156.1 | 44.1 |
| AD-62162.1 | 19.8 |
| AD-62168.1 | 17.3 |
| AD-62174.1 | 27 |
| AD-62180.1 | 15.8 |
| AD-62186.1 | 20.5 |
| AD-62192.1 | 33.9 |
| AD-62198.1 | 14 |
| AD-62157.1 | 19.3 |
| AD-62163.1 | 15.4 |
| AD-62169.1 | 23.6 |
| AD-62175.1 | 29.6 |
| AD-62181.1 | 26.4 |
| AD-62187.1 | 28.8 |
| AD-62193.1 | 22.9 |
| AD-62199.1 | 16.4 |
| AD-62158.1 | 18.5 |
| AD-62164.1 | 19.1 |
| AD-62170.1 | 15 |
| AD-62176.1 | 62.7 |
| AD-62182.1 | 70.8 |
| AD-62188.1 | 81.1 |
| AD-62194.1 | 63.6 |
| AD-62200.1 | 21.6 |
| AD-62159.1 | 42.8 |
| AD-62165.1 | 27.7 |
| AD-62171.1 | 31.9 |
| AD-62177.1 | 29.6 |
| AD-62183.1 | 25.2 |
| AD-62189.1 | 32.7 |
| AD-62195.1 | 73.1 |
| AD-62201.1 | 35.6 |
| AD-62160.1 | 56.5 |
| AD-62166.1 | 115.1 |
| AD-62172.1 | 107.4 |
| AD-62178.1 | 71.3 |
| AD-62184.1 | 27.2 |
| AD-62190.1 | 37.2 |
| AD-62196.1 | 19.5 |
| AD-62202.1 | 19.4 |
| AD-62161.1 | 23.7 |
| AD-62167.1 | 24.4 |
| AD-62173.1 | 36 |
| AD-62179.1 | 50.5 |
| AD-62185.1 | 40.5 |
| AD-62191.1 | 39.3 |
| AD-62197.1 | 39.4 |
| AD-62203.1 | 34.1 |
| AD-62209.1 | 34.6 |
| AD-62215.1 | 31 |
| AD-62221.1 | 16.3 |
| AD-62227.1 | 68.5 |
| AD-62233.1 | 34.3 |
| AD-62239.1 | 37.2 |
| AD-62245.1 | 31.2 |
| AD-62204.1 | 33 |
| AD-62210.1 | 29 |
| AD-62216.1 | 38.7 |
| AD-62222.1 | 34.5 |
| AD-62228.1 | 30.3 |
| AD-62234.1 | 15.2 |
| AD-62240.1 | 26.2 |
| AD-62246.1 | 40.4 |
| AD-62205.1 | 17.1 |
| AD-62211.1 | 20.9 |
| AD-62217.1 | 49.8 |
| AD-62223.1 | 40 |
| AD-62229.1 | 26.7 |
| AD-62235.1 | 21.5 |
| AD-62241.1 | 46.2 |
| AD-62247.1 | 40.4 |
| AD-62206.1 | 42.2 |
| AD-62212.1 | 51.7 |
| AD-62218.1 | 26 |
| AD-62224.1 | 40.3 |
| AD-62230.1 | 32.8 |
| AD-62236.1 | 52.4 |
| AD-62242.1 | 33.1 |
| AD-62248.1 | 18 |
| AD-62207.1 | 19.7 |
| AD-62213.1 | 43.4 |
| AD-62219.1 | 39.8 |
| AD-62225.1 | 34.3 |
| AD-62231.1 | 37.2 |
| AD-62237.1 | 25.9 |
| AD-62243.1 | 19.8 |
| AD-62249.1 | 13.8 |
| AD-62208.1 | 13.7 |
| AD-62214.1 | 16.6 |
| AD-62220.1 | 25.2 |
| AD-62226.1 | 27 |
| AD-62232.1 | 36.5 |
| AD-62238.1 | 51.5 |
| AD-62244.1 | 31.5 |
| AD-61874.1 | 27.1 |
| AD-61880.1 | 30.8 |
| AD-61886.1 | 30.4 |
| AD-61892.1 | 48.9 |
| AD-61898.1 | 24.7 |
| AD-61904.1 | 125.9 |
| AD-61910.1 | 45.7 |
| AD-61916.1 | 25.7 |
| AD-61875.1 | 33.4 |
| AD-61881.1 | 64 |
| AD-61887.1 | 36.7 |
| AD-61893.1 | 22.9 |
| AD-61899.1 | 84.5 |
| AD-61905.1 | 32.1 |
| AD-61911.1 | 23.7 |
| AD-61917.1 | 22.1 |
| AD-61876.1 | 47.3 |
| AD-61882.1 | 26.5 |
| AD-61888.1 | 27.7 |
| AD-61894.1 | 64.8 |
| AD-61900.1 | 89.8 |
| AD-61906.1 | 22.4 |
| AD-61912.1 | 19.8 |
| AD-61918.1 | 37.1 |
| AD-61877.1 | 145 |
| AD-61883.1 | 31.5 |
| AD-61889.1 | 33.9 |
| AD-61895.1 | 37.5 |
| AD-61901.1 | 26.1 |
| AD-61907.1 | 33 |
| AD-61913.1 | 33.1 |
| AD-61919.1 | 36.6 |
| AD-61878.1 | 26.9 |
| AD-61884.1 | 33.9 |
| AD-61890.1 | 37.2 |
| AD-61896.1 | 41.7 |
| AD-61902.1 | 58.6 |
| AD-61908.1 | 28 |
| AD-61914.1 | 31.4 |
| AD-61920.1 | 27.1 |
| AD-61879.1 | 33.1 |
| AD-61885.1 | 33.7 |
| AD-61891.1 | 41.3 |
| AD-61897.1 | 39.4 |
| AD-61903.1 | 51.5 |
| AD-61909.1 | 48.6 |
| AD-61915.1 | 122.4 |
| AD-61921.1 | 66.4 |
| AD-61927.1 | 40.5 |
| AD-61933.1 | 27.7 |
| AD-61939.1 | 28.1 |
| AD-61945.1 | 30 |
| AD-61951.1 | 33.7 |
| AD-61957.1 | 32.6 |
| AD-61963.1 | 17 |
| AD-61922.1 | 32.9 |
| AD-61928.1 | 28.3 |
| AD-61934.1 | 24 |
| AD-61940.1 | 28.2 |
| AD-61946.1 | 33.2 |
| AD-61952.1 | 167.9 |
| AD-61958.1 | 37 |
| AD-61964.1 | 30.6 |
| AD-61923.1 | 51.2 |
| AD-61929.1 | 29.4 |
| AD-61935.1 | 61 |
| AD-61941.1 | 29.5 |
| AD-61947.1 | 28.9 |
| AD-61953.1 | 23.7 |
| AD-61959.1 | 18.9 |
| AD-61965.1 | 17 |
| AD-61924.1 | 24.1 |
| AD-61930.1 | 31.9 |
| AD-61936.1 | 36.9 |
| AD-61942.1 | 13.8 |
| AD-61948.1 | 40.2 |
| AD-61954.1 | 41.8 |
| AD-61960.1 | 24.1 |
| AD-61966.1 | 18.9 |
| AD-61925.1 | 52.4 |
| AD-61931.1 | 25.8 |
| AD-61937.1 | 19.1 |
| AD-61943.1 | 27.8 |
| AD-61949.1 | 26.5 |
| AD-61955.1 | 83.8 |
| AD-61961.1 | 26 |
| AD-61967.1 | 16.3 |
| AD-61926.1 | 17.8 |
| AD-61932.1 | 18.6 |
| AD-61938.1 | 31.9 |
| AD-61944.1 | 29.5 |
| AD-61950.1 | 57.8 |
| AD-61956.1 | 42.1 |
| AD-61962.1 | 30 |
| AD-61968.1 | 29.1 |
| AD-61974.1 | 50.8 |
| AD-61980.1 | 19.7 |
| AD-61986.1 | 36.4 |
| AD-61992.1 | 36.3 |
| AD-61998.1 | 18.3 |
| AD-62004.1 | 14 |
| AD-62010.1 | 56.8 |
| AD-61969.1 | 30 |
| AD-61975.1 | 51.1 |
| AD-61981.1 | 37.6 |
| AD-61987.1 | 32.5 |
| AD-61993.1 | 23.4 |
| AD-61999.1 | 43.8 |
| AD-62005.1 | 23.8 |
| AD-62011.1 | 32.7 |
| AD-61970.1 | 39.6 |
| AD-61976.1 | 27.5 |
| AD-61982.1 | 64.9 |
| AD-61988.1 | 29.5 |
| AD-61994.1 | 40.5 |
| AD-62006.1 | 42.1 |
| AD-62012.1 | 21 |
| AD-61971.1 | 27.1 |
| AD-61977.1 | 23.4 |
| AD-61983.1 | 57.5 |
| AD-61989.1 | 25.8 |
| AD-61995.1 | 18.2 |
| AD-62001.1 | 29.7 |
| AD-62007.1 | 106.4 |
| AD-62013.1 | 36.1 |
| AD-61972.1 | 40.5 |
| AD-61978.1 | 49.1 |
| AD-61984.1 | 24.3 |
| AD-61990.1 | 38.8 |
| AD-61996.1 | 40.5 |
| AD-62002.1 | 32.5 |
| AD-62008.1 | 35.3 |
| AD-62014.1 | 23.6 |
| AD-61973.1 | 39.3 |
| AD-61979.1 | 27.4 |
| AD-61985.1 | 31.3 |
| AD-61991.1 | 34.9 |
| AD-61997.1 | 29.2 |
| AD-62003.1 | 25.9 |
| AD-62009.1 | 21.1 |
| AD-62056.1 | 16.3 |
| AD-62015.1 | 139.3 |
| AD-62021.1 | 36.4 |
| AD-62027.1 | 42.4 |
| AD-62033.1 | 62 |
| AD-62039.1 | 35.2 |
| AD-62045.1 | 30.8 |
| AD-62051.1 | 22.9 |
| AD-62057.1 | 31.8 |
| AD-62016.1 | 29.2 |
| AD-62022.1 | 36.9 |
| AD-62028.1 | 52.6 |
| AD-62034.1 | 31 |
| AD-62040.1 | 30.7 |
| AD-62046.1 | 28.2 |
| AD-62052.1 | 23.7 |
| AD-62058.1 | 77.9 |
| AD-62017.1 | 41 |
| AD-62023.1 | 27 |
| AD-62029.1 | 31.8 |
| AD-62035.1 | 46.4 |
| AD-62041.1 | 25.3 |
| AD-62047.1 | 20 |
| AD-62053.1 | 37.1 |
| AD-62059.1 | 31 |
| AD-62018.1 | 37.8 |
| AD-62024.1 | 34.7 |
| AD-62030.1 | 50.4 |
| AD-62036.1 | 25.5 |
| AD-62042.1 | 32.5 |
| AD-62048.1 | 28.3 |
| AD-62054.1 | 55.6 |
| AD-62060.1 | 26.9 |
| AD-62019.1 | 29 |
| AD-62025.1 | 78.5 |
| AD-62031.1 | 152.8 |
| AD-62037.1 | 27.3 |
| AD-62043.1 | 33.8 |
| AD-62049.1 | 46 |
| AD-62055.1 | 24.5 |
| AD-62061.1 | 30.5 |
| AD-62020.1 | 25.1 |
| AD-62026.1 | 24.9 |
| AD-62032.1 | 23 |
| AD-62038.1 | 21.2 |
| AD-62044.1 | 34.1 |
| AD-62050.1 | 22.4 |
| AD-62320.1 | 16.6 |
| AD-62326.1 | 16.6 |
| AD-62332.1 | 15.4 |
| AD-62338.1 | 41.9 |
| AD-62344.1 | 19.6 |
| AD-62350.1 | 32.3 |
| AD-62356.1 | 20.4 |
| AD-62362.1 | 27.8 |
| AD-62321.1 | 18.7 |
| AD-62327.1 | 14.8 |
| AD-62333.1 | 22.2 |
| AD-62339.1 | 134.5 |
| AD-62345.1 | 32.1 |
| AD-62351.1 | 35.6 |
| AD-62357.1 | 31 |
| AD-62363.1 | 28.2 |
| AD-62322.1 | 45.1 |
| AD-62328.1 | 30.1 |
| AD-62334.1 | 39.1 |
| AD-62340.1 | 24.3 |
| AD-62346.1 | 35.4 |
| AD-62352.1 | 33.8 |
| AD-62358.1 | 45.7 |
| AD-62364.1 | 19.7 |
| AD-62323.1 | 40.5 |
| AD-62329.1 | 57.5 |
| AD-62335.1 | 27.6 |
| AD-62341.1 | 69.2 |
| AD-62347.1 | 125.9 |
| AD-62353.1 | 53.1 |
| AD-62359.1 | 38.1 |
| AD-62365.1 | 23.6 |
| AD-62324.1 | 27.1 |
| AD-62330.1 | 25.1 |
| AD-62336.1 | 25.3 |
| AD-62342.1 | 45.4 |
| AD-62348.1 | 91.6 |
| AD-62354.1 | 132.1 |
| AD-62360.1 | 31.6 |
| AD-62366.1 | 14.2 |
| AD-62325.1 | 27.9 |
| AD-62331.1 | 31.5 |
| AD-62337.1 | 33.9 |
| AD-62343.1 | 36.1 |
| AD-62349.1 | 37.6 |
| AD-62355.1 | 38.8 |
| AD-62361.1 | 46.1 |
| AD-62367.1 | 23.6 |
| AD-62373.1 | 32.1 |
| AD-62379.1 | 29.6 |
| AD-62385.1 | 35.7 |
| AD-62391.1 | 33.7 |
| AD-62397.1 | 54.1 |
| AD-62403.1 | 34.8 |
| AD-62409.1 | 28.2 |
| AD-62368.1 | 29.7 |
| AD-62374.1 | 29.6 |
| AD-62380.1 | 30.6 |
| AD-62386.1 | 23.4 |
| AD-62392.1 | 30.5 |
| AD-62398.1 | 48.7 |
| AD-62404.1 | 24.8 |
| AD-62410.1 | 21.9 |
| AD-62369.1 | 27.4 |
| AD-62375.1 | 31.9 |
| AD-62381.1 | 27.3 |
| AD-62387.1 | 77 |
| AD-62393.1 | 93.3 |
| AD-62399.1 | 150.2 |
| AD-62405.1 | 28.5 |
| AD-62411.1 | 19.4 |
| AD-62370.1 | 16.3 |
| AD-62376.1 | 48.2 |
| AD-62382.1 | 28.5 |
| AD-62388.1 | 49.9 |
| AD-62394.1 | 29.9 |
| AD-62400.1 | 45.2 |
| AD-62406.1 | 23 |
| AD-62412.1 | 45.5 |
| AD-62371.1 | 66.5 |
| AD-62377.1 | 49.5 |
| AD-62383.1 | 73.8 |
| AD-62389.1 | 82.4 |
| AD-62395.1 | 31.8 |
| AD-62401.1 | 31.2 |
| AD-62407.1 | 30.2 |
| AD-62413.1 | 28.1 |
| AD-62372.1 | 43 |
| AD-62378.1 | 17.9 |
| AD-62384.1 | 29.6 |
| AD-62390.1 | 37.7 |
| AD-62396.1 | 26 |
| AD-62402.1 | 31.6 |
| AD-62408.1 | 46.6 |
| AD-62414.1 | 27.2 |
| AD-62415.1 | 17.6 |
| AD-62416.1 | 25.3 |
| AD-62417.1 | 36.3 |
| AD-61779.2 | 43.2 |
| AD-61785.2 | 22.5 |
| AD-61791.2 | 27.3 |
| AD-61797.2 | 30.5 |
| AD-61803.2 | 30.9 |
| AD-61809.2 | 75.1 |
| AD-61815.2 | 90.7 |
| AD-61821.2 | 33.7 |
| AD-61780.2 | 53.5 |
| AD-61786.2 | 34.4 |
| AD-61792.2 | 27.5 |
| AD-61798.2 | 23.3 |
| AD-61804.2 | 23.6 |

### Example 7: In Vivo Screening of Additional siRNAs

[0709] Based on the sequence of AD-58643, an additional four sense and three antisense sequences were synthesized and used to prepare twelve, 21/25 mer compounds (Table 23). In general, the antisense strands of these compounds were extended with a dTdT and the duplexes had fewer fluoro-modified nucleotides.

[0710] C57BL/6 mice (N=3 per group) were injected subcutaneously with 1 mg/kg of these GalNAc conjugated duplexes, serum was collected on day 0 pre-bleed, and day 5, and the levels of C5 proteins were quantified by ELISA. C5 protein levels were normalized to the day 0 pre-bleed level.

[0711] FIG. 14 shows the results of an in vivo single dose screen with the indicated iRNAs. Data are expressed as percent of C5 protein remaining relative to pre-bleed levels. Those iRNAs having improved efficacy as compared to the parent compound included AD-62510, AD-62643, AD-62645, AD-62646, AD-62650, and AD-62651. These iRNAs also demonstrated similar potencies (IC₅₀ of about 23-59 PM).

[0712] The efficacy of these iRNAs was also tested in C57B1/6 mice using a single-dosing administration protocol. Mice were subcutaneously administered AD-62510, AD-62643, AD-62645, AD-62646, AD-62650, and AD-62651 at a 0.25 mg/kg, 0.5 mg/kg, 1.0 mg/kg, or 2.5 mg/kg dose. Serum was collected at days 0 and 5 and analyzed for C5 protein levels by ELISA. C5 levels were normalized to the day 0 pre-bleed level.

[0713] FIG. 15 shows that there is a dose response with all of the tested iRNAs and that single-dosing of all of these iRNAs achieved silencing of C5 protein similar to or better than AD-58641.

[0714] The duration of silencing of AD-62510, AD-62643, AD-62645, AD-62646, AD-62650, and AD-62651 in vivo was determined by administering a single 1.0 mg/kg dose to C57B1/6 mice and determining the amount of C5 protein present on days 6, 13, 20, 27, and 34 by ELISA. C5 levels were normalized to the day 0 pre-bleed level.

[0715] As demonstrated in FIG. 16, each of the iRNAs tested has the same recovery kinetics as AD-62643 trending toward the best silencing, but within the error of the assay.

[0716] AD-62510, AD-62643, AD-62645, AD-62646, AD-62650, and AD-62651 were further tested for efficacy and to evaluate the cumulative effect of the iRNAs in rats using a repeat administration protocol. Wild-type Sprague Dawley rats were subcutaneously injected with each of the iRNAs at a 5.0 mg/kg/dose on days 0, 4, and 7. Serum was collected on days 0, 4, 7, 11, 14, 18, 25, 28, and 32. Serum hemolytic activity was quantified as described above.

[0717] The results depicted in FIG. 17 demonstrate that all of the tested iRNAs have a potent and durable decrease in hemolytic activity and a similar recovery of hemolysis to that observed with AD-58641 treatment.

TABLE 23
Modified Sense and Antisense Strand
Sequences of GalNAc-Conjugated C5 dsRNAs.

| Duplex | | Sense | SEQ ID | | Antisense | SEQ ID |
|---|---|---|---|---|---|---|
| ID | sense ID | (5′ to 3′) | NO: | AS ID | (5′ to 3′) | NO: |
| AD-58643 | A-119326.1 | AfsasGfcAfaGf | 2873 | A-119327.1 | usAfsuUfaUfaA | 2886 |
| | | aUfAfUfuUfuUf | | | faAfauaUfcUfu | |
| | | aUfaAfuAfL96 | | | GfcUfususu | |
| AD-62642 | A-125167.7 | asasGfcAfaGfa | 2874 | A-125139.1 | usAfsuuaUfaAf | 2887 |
| | | UfAfUfuUfuuAf | | | aAfauaUfcUfuG | |
| | | uAfauaL96 | | | fcuususudTdT | |
| AD-62510 | A-125167.7 | asasGfcAfaGfa | 2875 | A-125173.2 | usAfsUfuAfuAf | 2888 |
| | | UfAfUfuUfuuAf | | | AfaAfauaUfcUf | |
| | | uAfauaL96 | | | uGfcuususudTdT | |
| AD-62643 | A-125167.7 | asasGfcAfaGfa | 2876 | A-125647.1 | usAfsUfuAfuaA | 2889 |
| | | UfAfUfuUfuuAf | | | faAfauaUfcUfu | |
| | | nAfauaL96 | | | GfcuususudTdT | |
| AD-62644 | A-125157.17 | asasGfcAfaGfa | 2877 | A-125139.1 | usAfsuuaUfaAf | 2890 |
| | | UfAfUfuUfuuAf | | | aAfauaUfcUfuG | |
| | | uaAfuaL96 | | | fcuususudTdT | |
| AD-62645 | A-125157.17 | asasGfcAfaGfa | 2878 | A-125173.2 | usAfsUfuAfuAf | 2891 |
| | | UfAfUfuUfuuAf | | | AfaAfauaUfcUf | |
| | | uaAfuaL96 | | | uGfcuususudTdT | |
| AD-62646 | A-125157.17 | asasGfcAfaGfa | 2879 | A-125647.1 | usAfsUfuAfuaA | 2892 |
| | | UfAfUfuUfuuAf | | | faAfauaUfcUfu | |
| | | uaAfuaL96 | | | GfcuususudTdT | |
| AD-62647 | A-125134.1 | asasgcaagauaU | 2880 | A-125139.1 | usAfsuuaUfaAf | 2893 |
| | | fuuuua(Tgn)aa | | | aAfauaUfcUfuG | |
| | | uaL96 | | | fcuususudTdT | |
| AD-62648 | A-125134.1 | asasgcaagauaU | 2881 | A-125173.2 | usAfsUfuAfuAf | 2894 |
| | | fuuuua(Tgn)aa | | | AfaAfauaUfcUf | |
| | | uaL96 | | | uGfcuususudTdT | |
| AD-62649 | A-125134.1 | asasgcaagauaU | 2882 | A-125647.1 | usAfsUfuAfuaA | 2895 |
| | | fuuuua(Tgn)aa | | | faAfauaUfcUfu | |
| | | uaL96 | | | GfcuususudTdT | |
| AD-62428 | A-125127.2 | asasgcaagaUfa | 2883 | A-125139.1 | usAfsuuaUfaAf | 2896 |
| | | UfuuuuauaauaL | | | aAfauaUfcUfuG | |
| | | 96 | | | fcuususudTdT | |
| AD-62650 | A-125127.2 | asasgcaagaUfa | 2884 | A-125173.2 | usAfsUfuAfuAf | 2897 |
| | | UfuuuuauaauaL | | | AfaAfauaUfcUf | |
| | | 96 | | | uGfcuususudTdT | |
| AD-62651 | A-125127.2 | asasgcaagaUfa | 2885 | A-125647.1 | usAfsUfuAfuaA | 2898 |
| | | UfuuuuauaauaL | | | faAfauaUfcUfu | |
| | | 96 | | | GfcuususudTdT | |

### Example 8: Sustained C5 Protein Knockdown in Non-Human Primates

[0718] AD-62643 was tested for its ability to decrease the serum levels of C5 protein after long-term treatment. Cynomolgus macaques (N=3 per group) were administered AD-62643 via subcutaneous injection using two dosing regimens. In the first dosing regimen (Q2W), AD-62643 was administered every week for 8 weeks at a dose of 5 mg/kg, followed by administration every 2 weeks at a dose of 5 mg/kg thereafter (5 mg/kg, qw×8, q2w thereafter). In the second dosing regimen (QM), AD-62643 was administered every day at a dose of 5 mg/kg for 5 days, followed by administration every week for 8 weeks at a dose of 5 mg/kg, followed by a monthly administration of a dose of 10 mg/kg thereafter (5 mg/kg, qd×5, qw×8/10 mg/kg qm thereafter). The levels of C5 protein were quantified by ELISA, and C5 protein levels were normalized to the day 0 pre-bleed level. Serum hemolytic activity was analyzed using a sensitized sheep erythrocyte assay to measure classical pathway activity. The percent hemolysis was calculated relative to maximal hemolysis and to background hemolysis in control samples. The alternative complement pathway (CAP) activity was also measured.

[0719] FIG. 19A shows the average % serum C5 levels relative to the pre-bleed levels for the two tested dosing regimens. FIG. 19B shows the % serum C5 levels relative to the pre-bleed levels for each individual animal tested. The data demonstrates that both dosing regimens are able to achieve and maintain, on average, up to ˜99% (98.2±0.8%) knockdown of serum C5, with low inter-animal variation.

[0720] FIG. 20A shows % hemolysis and % CAP activity relative to control with the QM regimen and FIG. 20B shows % hemolysis and % CAP activity relative to control with the Q2W regimen. FIG. 20C shows the correlation of the hemolysis and CAP activity with the levels of C5 knockdown. The data demonstrate robust inhibition of both classical and alternative pathway of complement acitivity; specifically, C5 knockdown is associated with >80% (up to 96.2%) lowering of complement serum hemolytic acitivity and >90% (up to 96.9%) lowering of CAP activity.

### Example 9: C5 Silencing and Clinical Disease Activity in Mouse Model of Arthritis

[0721] AD-61679 was tested in a mouse model of anti-collagen antibody-induced arthritis (CAIA) for its ability to decrease serum C5 levels and to inhibit clinical disease activity, and compared to an anti-C5 antibody. CAIA mice were administered AD-61679 (5 mg/kg, N=7), control siRNA (10 mg/kg, N=6), anti-C5 antibody (50 mg/kg, N=7) and PBS (N=7). AD-61679 and siRNA control were administered three times (every 5 days-days-5, 0, 5); while the anti-C5 antibody was administered once at day 0. Serum levels of C5 protein were measured using ELISA and are shown in FIG. 21. Clinical disease activity (CDA) was scored each day of the 10-day interval starting at day 0 and the results are shown in FIG. 22. Joint inflammation, pannus, and cartilage and bone damage were measured by scoring of hematoxylin and eosin (H&E) and Toluidine Blue histological stains (FIG. 23A). C3 deposition was also measured by immunohistochemistry using anti-C3 antibody (FIG. 23B).

[0722] As shown in FIG. 21, upregulation of the C5 levels over the 10-day treatment period is observed in mice treated with PBS, and control siRNA and anti-C5 antibody, while robust knockdown of plasma C5 protein is observed in AD-61679 treated animals. No modulation of C5 knockdown by LPS, injected on day 3, is observed. Circulating liver-derived C5 appears to be a key driver of pathology in CAIA mice, with the locally produced C5 playing little or no role. The data in FIGS. 22A and 22B demonstrate that treatment with AD-61679, similar to the treatment with the anti-C5 antibody, preserves joint histology, e.g., prevents inflammation, cartilage damage, bone damage and pannus, and prevents C3 deposition in the synovium and cartilage.

### Example 10: Effect of C5 Protein Knockdown in Rat Model of Membranous Nephropathy

[0723] AD-61679 was tested in a rat model of Passive Neymann Nephritis for its ability to reduce proteinurea. Nephritis was induced by injection of sheep anti-rat kidney fraction antiserum (anti-Fx1A) at day 0 and day 1. Control rats received no AD-61679 or anti-Fx1A treatment. Prior to the injection of anti-Fx1A, rats were administered AD-61679 at day-10, day-7 and day-3. AD-61679 was also administered on days 0, 1 and 4. Serum hemolytic activity in control rats, as well as rats treated with anti-Fxla alone or with anti-Fxla and AD-61679 was measured and is shown in FIG. 23A. Urine was collected on days 2 and 5, and levels of urinary protein at day were measured and are shown in FIG. 23B. The data indicate that AD-61679 is efficient in reducing serum hemolytic activity and proteinurea in the rat model of Passive Neymann Nephritis.

### Example 11: Phase I/II-Part A Clinical Trial of AD-62643

[0724] A Phase I/II, randomized, double-blind, placebo-controlled, single-dose, dose escalation study was conducted in normal healthy volunteers (n=20) to evaluate the safety, tolerability, pharmacokinetics and pharmacodynamics of subcutaneously administered AD-62643 as described below.

[0725] Five cohorts, each including 4 subjects, participated in this study. One cohort was subcutaneously administered a single 50 mg dose of AD-62643; a second cohort was subcutaneously administered a single 200 mg dose of AD-62643; a third cohort was subcutaneously administered a single 400 mg dose of AD-62643; a fourth cohort was subcutaneously administered a single 600 mg dose of AD-62643; and a fifth cohort was subcutaneously administered a single 900 mg dose of AD-62643. A 200 mg/ml solution of AD-62643 was used for administration. The demographics and baseline characteristics of the subjects participating in the study are provided in Table 24.

TABLE 24
Demographics and baseline characteristics of healthy volunteers

| | Part A: Single Ascending Dose (SAD) | | | | |
|---|---|---|---|---|---|
| | Single subcutaneous injection | | | | |
| | 50 mg | 200 mg | 400 mg | 600 mg | 900 mg |
| | N = 4 | N = 4 | N = 4 | N = 4 | N = 4 |
| Age (years), | 23.8 | 22.5 | 22.0 | 28.5 | 26.8 |
| Mean (Min, Max) | (20, 26) | (21, 24) | (20, 27) | (23, 38) | (22, 33) |
| Gender: Male(%) | 100% | 100% | 75% | 0% | 50% |
| BMI (kg/m²), Mean | 24.08 | 22.35 | 21.38 | 24.80 | 23.53 |
| Race (%) | | | | | |
| Asian | 0% | 0% | 25% | 50% | 0% |
| Black/African | 25% | 50% | 0% | 0% | 25% |
| Caucasian | 50% | 25% | 50% | 50% | 75% |
| Other | 25% | 25% | 25% | 0% | 0% |
| Time on study, | 115 | 286 | 211 | 293 | 258 |
| Mean (days) | | | | | |

[0726] There were no injection site reactions, serious adverse events, or study discontinuations and no clinically significant changes in vital signs, physical exams, clinical laboratories (hematology, biochemistry, coagulation, and urinalysis), or ECGs.

[0727] The knockdown of C5 levels in the single fixed dose 50 mg, 200 mg, 400 mg, 600, and 900 mg cohorts, shown as a mean C5 knockdown relative to baseline, is depicted in FIG. 24. The maximum C5 knockdown relative to baseline was 99% and the mean maximum C5 knockdown was 98±0.9% (mean±SEM). The mean C5 knockdown of 96±1.0% (mean±SEM) was observed at Day 98 in the 900 mg cohort; the mean C5 knockdown of 97±1.1% (mean±SEM) was observed at Day 98 in the 600 mg cohort; and the mean C5 knockdown of 94±1.1% (mean±SEM) was observed at Day 182 in the 600 mg cohort.

[0728] The effect of administration of a single 50 mg, 200 mg, 400 mg, 600, and 900 mg dose of AD-62643 to inhibit complement activity, measured as alternative complement pathway (CAP) activity and as classical complement pathway (CCP) activity were assessed by determining the amount of active C5b-9 formation. CCP and CAP activation are ELISA based assays where complement in a serum sample is activated by a pathway specific activator present in the plate and the formation of Membrane Attack Complex (MAC) (C5b-9) is detected using antibody-based detection.

[0729] As shown in FIG. 25, the maximum CAP inhibition, relative to baseline, was up to 95%, with a mean maximum of inhibition of 93±1.3% (mean±SEM). FIG. 26 shows that the maximum CCP inhibition, relative to baseline, was up to 97%, with a mean maximum of inhibition of 96±0.7% (mean±SEM).

[0730] The effect of administration of a single 50 mg, 200 mg, 400 mg, 600, and 900 mg dose of AD-62643 to inhibit complement activity as measured by serum hemolytic activity was assessed using a sensitized sheep erythrocyte assay to measure CCP activation. As shown in FIG. 27, the maximum serum hemolysis inhibition, relative to baseline, was up to 79%, with a mean maximum hemolysis inhibition of 74±4.2% (mean±SEM).

[0731] A correlation analysis of the C5 knockdown in human and non-human primates was also performed. The correlation analysis assumed that a 50 mg dose in humans was equivalent to a 1 mg/kg dose in NHP and that a 400 mg dose in humans was equivalent to a 5 mg/kg dose in NHP. The knockdown of C5 levels in humans administered a single 50 mg or 400 mg subcutaneous dose of AD-62643 and NHP administered a single 1 mg/kg or 5 mg/kg subcutaneous dose of AD-62643 is shown in FIG. 28B and a graph showing the correlation of C5 knockdown in humans versus NHP is shown in FIG. 28A. This analysis demonstrated that there is a statistically significant correlation between C5 knockdown in humans and NHP with r=0.83 and p<0.0001 and that there is a 3 to 5 time increased potency of the dsRNAi agent for C5 knockdown in humans as compared to NHP.

[0732] FIG. 29 and Table 25 show that, in addition to knocking down C5 levels, AD-62643 also inhibits complement activity, measured as classical complement pathway (CCP) activity assessed by the amount of active C5b-9 formation, described above.

TABLE 25
Serum C5 knockdown and inhibition of complement activity

| | 50 mg | 200 mg | 400 mg |
|---|---|---|---|
| | N = 3 | N = 3 | N = 3 |
| Mean max C5 | 79 ± 2.2 | 94 ± 0.2 | 94 ± 2.0 |
| KD (% ± | | | |
| SEM) | | | |
| Max C5 KD | 84 | 94 | 96 |
| (%) | | | |
| Mean max | 59 ± 6.5 | 84 ± 1.7 | 82 ± 6.1 |
| CCP | | | |
| inhibition | | | |
| (% ± SEM) | | | |
| Max CCP | 72 | 86 | 92 |
| inhibition | | | |
| (%) | | | |
| Mean max | 59 ± 7.3 | 79 ± 1.2 | 75 ± 7.2 |
| CAP | | | |
| inhibition | | | |
| (% ± SEM) | | | |
| Max CAP | 73 | 81 | 87 |
| inhibition | | | |
| (%) | | | |

[0733] Complement activity measured by serum hemolytic activity was analyzed using a the sensitized sheep erythrocyte assay to measure classical pathway activity, described above. The percent hemolysis was calculated relative to maximal hemolysis and to background hemolysis in control samples.

[0734] FIG. 30A shows % hemolysis relative to control in subjects administered a single subcutaneous dose of AD-62643 and FIG. 30B showns % hemolysis in NHP administered a single subcutaneous dose of AD-62643. These data demonstrate that there is up to a 61% inhibition of serum hemolytic activity in humans with a single subcutaneous dose of AD-62643 and a mean maximum inhibition of 43±9.1%. Furthermore, comparison of the data in FIGS. 30A and 30B demonstrates that there is comparable hemolysis inhibition in humans and NHP administered a single dose of AD-62643.

[0735] A summary of the results of this Phase I/II clinical trail are provided in Table 26.

TABLE 26
Summary of Phase I/II Part A Study

| | Part A: Single Ascending Dose (SAD) | | | | | |
|---|---|---|---|---|---|---|
| | Single subcutaneous injection | | | | | |
| | 50 mg | 200 mg | 400 mg | 600 mg | 900 mg | Placebo |
| Residual C5 | | | | | | |
| Mean nadir; μg/mL ± SEM | 15.3 ± 2.5 | 5.2 ± 0.5 | 3.8 ± 1.0 | 2.2 ± 0.8 | 1.8 ± 0.2 | 59.6 ± 2.6 |
| Nadir; μg/mL | 10.8 | 4.3 | 1.8 | 1.1 | 1.4 | 53.5 |
| C5 knockdown | | | | | | |
| Mean max; % ± SEM | 78 ± 3.2 | 93 ± 0.9 | 95 ± 1.4 | 98 ± 0.9 | 98 ± 0.3 | 14 ± 2.7 |
| Max; % | 84 | 95 | 97 | 99 | 98 | 20 |
| CCP inhibition | | | | | | |
| Mean max; % ± SEM | 59 ± 6.5 | 84 ± 1.6 | 86 ± 3.2 | 96 ± 0.7 | 92 ± 1.1 | 20 ± 5.1 |
| Max; % | 72 | 86 | 93 | 97 | 94 | 37 |
| CAP inhibition | | | | | | |
| Mean max; % ± SEM | 59 ± 7.3 | 79 ± 1.2 | 80 ± 5.7 | 93 ± 1.3 | 93 ± 0.7 | 26 ± 7.6 |
| Max; % | 73 | 81 | 91 | 95 | 94 | 44 |
| Hemolysis inhibition | | | | | | |
| Mean max; % ± SEM | 35 ± 7.9 | 41 ± 4.4 | 48 ± 11.9 | 74 ± 4.2 | 71 ± 4.7 | 9 ± 1.4 |
| Max; % | 51 | 47 | 71 | 79 | 78 | 13 |

[0736] In summary, these data demonstrate that there is a robust, dose-dependent, statistically significant, and durable knockdown of serum C5 with a single dose of AD-62643. There was up 99% C5 knockdown with mean maximum knockdown of 98±9% (mean±SEM) after a single fixed dose which was durable and lasted for months. In addition, a single dose of AD-62643 resulted in a clinically meaningful reduction in complement activity as complement activity. Furthermore, these data demonstrate that there was an excellent translation from NHP studies suggesting a 3-5×increased potency in humans.

### Example 12: Phase I/II-Part B Clinical Trial of AD-62643

[0737] A Phase I/II, randomized, double-blind, placebo-controlled, multiple-dose, dose escalation study was conducted in normal healthy volunteers (n=24) to evaluate the safety, tolerability, pharmacokinetics and pharmacodynamics of subcutaneously administered AD-62643 as described below.

[0738] Six cohorts, each including 4 subjects, participated in this study. One cohort was subcutaneously administered a weekly 100 mg dose of AD-62643 for five weeks (q1W×5); a second cohort was subcutaneously administered a weekly 200 mg dose of AD-62643 for five weeks (q1W×5); a third cohort was subcutaneously administered a weekly 400 mg dose of AD-62643 for five weeks (q1W×5); a fourth cohort was administered a 600 mg dose of AD-62643 once every two weeks for seven weeks (q2W×7); a fifth cohort was administered a weekly 200 mg dose of AD-62643 for five weeks, followed by a 200 mg dose of AD-62643 once every two weeks for four weeks (qW×5, q2w×4); and a sixth cohort was administered a weekly 200 mg dose of AD-62643 for five weeks, followed by a 200 mg dose of AD-62643 once every month for two months (qW×5, qM×2). A 200 mg/ml solution of AD-62643 was used for administration. The demographics and baseline characteristics of the subjects participating in the study are provided in Table 27.

TABLE 27
Demographics and baseline characteristics of healthy volunteers

| | Part B: Multiple Ascending Dose (MAD) | | | | | |
|---|---|---|---|---|---|---|
| | N = 4/cohort | | | | | |
| | | | | | 200 mg | 200 mg |
| | 100 mg | 200 mg | 400 mg | 600 mg | qW × 5, | qW × 5, |
| | qW × 5 | qW × 5 | qW × 5 | q2W × 7 | q2W × 4 | qM × 2 |
| Age (years), Mean | 33.8 | 28.0 | 25.0 | 28.0 | 25.0 | 24.5 |
| (Min, Max) | (24, 39) | (24, 32) | (20, 30) | (24, 32) | (23, 30) | (19, 30) |
| Gender: Male (%) | 75% | 25% | 50% | 50% | 75% | 50% |
| BMI (kg/m²), Mean | 24.55 | 23.68 | 25.48 | 22.68 | 23.50 | 26.65 |
| Race (%) | | | | | | |
| Asian | 0% | 0% | 0% | 0% | 0% | 0% |
| Black/African | 0% | 0% | 0% | 0% | 0% | 0% |
| Caucasian | 100% | 100% | 100% | 100% | 75% | 100% |
| Other | 0% | 0% | 0% | 0% | 25% | 0% |
| Time on study, Mean | 316 | 267 | 219 | 156 | 125 | 112 |
| (days) | | | | | | |

[0739] There were no injection site reactions, serious adverse events, or study discontinuations and no clinically significant changes in vital signs, physical exams, clinical laboratories (hematology, biochemistry, coagulation, and urinalysis), or ECGs.

[0740] The knockdown of C5 levels in the six cohorts, shown as a mean C5 knockdown relative to baseline, is depicted in FIG. 31. The maximum C5 knockdown, relative to baseline was 99% and the mean maximum C5 knockdown was 99±0.2% (mean±SEM). The mean C5 knockdown of 99±0.2% (mean±SEM) was observed at Day 112 in the 600 mg q2w×7 cohort.

[0741] The effect of multiple dose administration of AD-62643 to inhibit complement activity, measured as alternative complement pathway (CAP) activity and as classical complement pathway (CCP) activity was also assessed by determining the amount of active C5b-9 formation, as described above.

[0742] As shown in FIG. 32, the maximum CAP inhibition, relative to baseline, was up to 99.5%, with a mean maximum of inhibition of 97±1.5% (mean±SEM). FIG. 33 shows that the maximum CCP inhibition, relative to baseline, was up to 99.4%, with a mean maximum of inhibition of 97.3±1.0% (mean±SEM). The observed levels of inhibition of CAP and CAP activity in the second through the sixth cohorts (200 mg qW×5 and higher) were comparable to the levels of inhibition of CAP and CCP activity observed in subjects having a homozygous deletion of C5 (Seelen, et al. (2005) J Immunol Methods 296:187-198).

[0743] The effect of administration of multiple weekly doses of AD-62643 to inhibit complement activity as measured by serum hemolytic activity using a sensitized sheep erythrocyte assay to measure CCP activation (described above) was also assessed. As shown in FIG. 34, the maximum serum hemolysis inhibition, relative to baseline, was up to 98%, with a mean maximum hemolysis inhibition of 86±1.5% (mean±SEM).

[0744] A summary of the results of this Phase I/II clinical trial are provided in Table 28.

TABLE 28
Summary of Phase I/II Part B Study

| | Part B: Multiple Ascending Dose (MAD) | | | | | | |
|---|---|---|---|---|---|---|---|
| | Multiple Subcutaneous Injections | | | | | | |
| | | | | | 200 mg | 200 mg | |
| | 100 mg | 200 mg | 400 mg | 600 mg | qW × 5, | qW × 5, | Placebo |
| | qW × 5 | qW × 5 | qW × 5 | q2W × 7 | q2W × 4 | qM × 2 | N = 6 |
| Residual C5 levels | | | | | | | |
| Mean nadir; mcg/mL ± SEM | 4.2 ± 0.5 | 1.3 ± 0.3 | 1.3 ± 0.2 | 0.8 ± 0.1 | 1.4 ± 0.3 | 2.7 ± 1.7 | 60.2 ± 5.4 |
| Nadir; mcg/mL | 3.5 | 0.6 | 1.0 | 0.7 | 1.0 | 1.0 | 37.3 |
| C5 knockdown | | | | | | | |
| Mean max; % ± SEM | 95 ± 0.4 | 98 ± 0.5 | 98 ± 0.2 | 99 ± 0.2 | 98 ± 0.4 | 97 ± 2.1 | 24 ± 5.3 |
| Max; % | 96 | 99 | 99 | 99 | 99 | 99 | 43 |
| CAP inhibition | | | | | | | |
| Mean max; % ± SEM | 84 ± 2.1 | 95 ± 1.0 | 97 ± 1.5 | 97 ± 0.8 | 95 ± 0.8 | 89 ± 6.5 | 25 ± 5.8 |
| Max; % | 88 | 97 | 100 | 98 | 96 | 96 | 50.4 |
| CCP inhibition | | | | | | | |
| Mean max; % ± SEM | 85 ± 2.6 | 96 ± 0.9 | 97 ± 1.0 | 97 ± 0.7 | 96 ± 1.0 | 89 ± 6.0 | 28 ± 7.0 |
| Max; % | 91 | 97 | 99 | 98 | 98 | 95 | 50 |
| Hemolysis inhibition | | | | | | | |
| Mean max; % ± SEM | 52 ± 4.9 | 75 ± 8.0 | 84 ± 7.6 | 86 ± 1.5 | — | — | 5 ± 2.0 |
| Max; % | 58 | 91 | 98 | 89 | — | — | 10 |

[0745] An indirect comparison of residual C5 levels in the serum of healthy human volunteers administered multiple doses of AD-62643 and the levels of free C5 in aHUS subjects aministered eculizumab was performed. Free C5 was measured using a validated electrochemiluminescence immunoassay and residual C5 was measured using a validated liquid chromatography-mass spectrometry (LCMS) assay The results of this analysis demonstrate that the residual C5 levels achieved with AD-62643 multi-administration are comparable to the levels of free C5 in patients administered eculizumab; the maximum percent inhibition of free C5 following administration of Eculizumab was 93.5% (FIG. 35A) and the maximum percent inhibition of residual C5, relative to baseline, following administration of AD-62643 was 100% (FIG. 35B), with a mean maximum inhibition of 100%±0.2% (mean±SEM).

[0746] In summary, these data demonstrate that there is a robust, dose-dependent, statistically significant, and durable knockdown of serum C5 with multi-dose subcutaneous administration of AD-62643. After 5 weekly doses of AD-62643 there was up to 99% C5 knockdown, with a mean maximum knockdown of 99±0.2%, which was durable and lasted for months. In addition, very low inter-subject variability was observed.

[0747] Furthermore, a multiple dose of AD-62643 resulted in a clinically meaningful reduction in complement activity. The observed nadir of residual C5 was as low as 0.6 microgram (mcg)/mL and after five weekly doses of AD-62643, complement activity (CAP and CCP activity) were reduced by up to 99.5% with mean maximum inhibition of 97±1.5% for CAP and 99±0.2% for CCP. A reduction of serum hemolytic activity up to 98% with mean maximum inhibition of 86±1.5% was also observed following administration of five weekly doses of AD-62643.

### Example 13: Phase I/II-Part C Clinical Trial of AD-62643

[0748] Part C of the Phase I/II Clinical Trial of AD-62643 was an exploratory evaluation of subcutaneously administered AD-62643 and hepatic C5 knockdown for the treatment of PNH. AD-62643 was administered as a monotherapy to eculizuman naïve PNH patients (n=3) or as a combination therapy to PNH patients being treated with eculizumab (n=3), including a patient with inadequate response to eculizumab.

[0749] The demographics and baseline characteristics of the subjects participating in the study are provided in Table 29.

TABLE 29
Demographics and baseline characteristics of
six PNH patients administered AD-62643
Part C: PNH Patients

| | |
|---|---|
| Age (years), | 43.7 |
| Mean (Min, Max) | (25, 58) |
| Gender: Male (%) | 50% |
| BMI (kg/m²), Mean | 24.6 |
| Race (%) | |
| Asian | 0% |
| Black/African | 0% |
| Caucasian | 100% |
| Other | 0% |
| Time on study, Mean (days) | 256 |
| Time in exploratory Eculizumab sparing | 108 |
| study, days; mean | |

[0750] Two cohorts, each including 3 subjects, participated in this study. The first cohort included eculizumab naïve subjects. Two subjects in the first cohort were subcutaneously administered a weekly 200 mg dose of AD-62643 for twelve weeks (q1W×12), followed by a weekly 400 mg dose for 3 weeks (q1W×3). The third subject in the first cohort was subcutaneously administered a weekly 400 mg dose for 7 weeks (qW×7). After AD-62643 dosing was completed, all subjects in the first cohort received a single 600 mg dose of eculizumab for residual hemolysis.

[0751] The second cohort included two subjects receiving 900 mg of eculizumab every other week (background eculizumab subjects) and one subject receiving 1200 mg of eculizumab every other week (an inadequate responder to eculizumab). The first subject on 900 mg of eculizumab was subcutaneously administered a weekly 400 mg dose of AD-62643 for 3 weeks (q1W×3); the second subject on 900 mg of eculizumab was subcutaneously administered a weekly 400 mg dose of AD-62643 for 2 weeks (q1W×2); and the third subject on 1200 mg of eculizumab was subcutaneously administered a weekly 200 mg dose of AD-62643 for 11 weeks (q1W×11). The dosing schedules for each patient are summarized in Table 30 below.

TABLE 30
Dosing schedule of PNH patients administered AD-62643

| Patient | | |
|---|---|---|
| No. | Eculizumab Status | AD-62643 Dosing Schedule |
| 0081 | Naïve | 200 mg once weekly for 12 weeks, then |
| | | 400 mg once weekly for 3 weeks |
| 0082 | Naïve | 200 mg once weekly for 12 weeks, then |
| | | 400 mg once weekly for 3 weeks |
| 0061 | Naïve | 400 mg once weekly for 7 weeks |
| 0063 | Receiving 900 mg | 400 mg once weekly for 3 weeks |
| | every other week | |
| 0064 | Receiving 900 mg | 400 mg once weekly for 2 weeks |
| | every other week | |
| 0083 | Receiving 1200 mg | 200 mg once weekly for 11 weeks |
| | every other week | |
| | inadequate responder | |

[0752] There were no serious adverse events or study discontinuations due to adverse events. All six patients reported at least one adverse event, and the majority of reported adverse events were mild to moderate in severity. No other clinically significant changes in vital signs, EKG, physical exams or clinical laboratories (hematology, biochemistry, coagulation, and urinalysis) were observed.

[0753] The knockdown of C5 levels were measured in the eculizumab naïve subjects, and the data is depicted in FIG. 36A as a mean C5 knockdown relative to baseline. In these subjects, maximum C5 knockdown, relative to baseline was up to 98.7%, the mean maximum C5 knockdown was 98.2±0.3% (mean±SEM), and the minimum residual C5 levels were 0.9 mcg/mL.

[0754] The knockdown of C5 levels was also measured in subjects receiving eculizumab, and the data is depicted in FIG. 36B as a mean C5 knockdown relative to baseline. In these subjects, the maximum C5 knockdown, relative to baseline was up to 97.8%, the mean maximum C5 knockdown was 86.7±5.6% (mean±SEM), and the minimum residual C5 levels were 7.9 mcg/mL. Interestingly, starting levels of total C5 in subjects receiving eculizumab were markedly higher than the levels in eculizumab naïve patients, suggesting that treatment with eculizumab may lead to increased total C5 levels.

[0755] The effect of AD-62643 administration on complement activity, measured as classical complement pathway (CCP) activity and alternative complement pathway (CAP) activity, was also assessed by determining the amount of active C5b-9 formation, as described above. The results for eculizumab naïve subjects are depicted in FIG. 37A. In these subjects, the maximum CCP inhibition, relative to baseline, was up to 96.7%, and the mean maximum of inhibition of 94.2±1.7% (mean±SEM). Similar results were observed with alternative pathway assay (CAP C5b-9 ELISA). The results for subjects receiving eculizumab are depicted in FIG. 37B. In these subjects, residual complement activity was measured as being<2% from day 21 onward.

[0756] The effect of AD-62643 administration on complement activity as measured by serum hemolytic activity using a sensitized sheep erythrocyte assasy (described above) was also assessed. The results for eculizumab naïve subjects are shown in FIG. 38A. In these subjects, the maximum serum hemolysis inhibition, relative to baseline, was up to 81.5%, with a mean maximum hemolysis inhibition of 75.6±4.5% (mean±SEM). The results for background eculizumab subjects are depicted in FIG. 38B. In these subjects, residual sheep red blood cell (sRBC) hemolysis was <3% from day 21 onward.

[0757] During treatment of subjects with AD-62643, LDH levels were also monitored in all patients. FIG. 39 depicts levels of LDH measured in eculizumab naïve patients. In these patients, maximum LDH reduction relative to baseline of 37% and 50% was observed in patients 0082 and 0081, respectively, however, LDH levels remained >1.5×ULN. In patient 0061, who had lower LDH at baseline and received only 8 doses of AD-62643, LDH lowering was not observed. LDH levels were also monitored in eculizumab naïve subjects after administration of a single 600 mg dose of eculizumab. In all three subjects, lowering of LDH <1.5ULN was observed and was sustained out to 4 weeks. The data on LDH levels after administration of a single dose of eculimumab is presented in Table 31 below.

TABLE 31
LDH levels after administration of a single 600 mg dose
of eculizumab in eculizumab naïve patients.

| | LDH (Ul/L) | | |
|---|---|---|---|
| | Days post Ecu single dose (600 mg) | | |
| Patient | Day 0 | Day 14 | Day 28 |
| 0061 | 426 | 217 | 222 |
| 0081 | 874 | ND | 224 |
| 0082 | 1089 | ND | 280 |

LDH ULN: 214-225 (1.5 × ULN values: 321-338)
ND—not determined; samples were not collected.

[0758] LDH levels were also measured in subjects receiving eculizumab. In the two background eculizumab subjects (patients 0063 and 0064), normal LDH at baseline was maintained during the treatment with AD-62643. In the eculizumab inadequate responder (patient 0083), LDH at day 0 was 966 IU/L while this patient received eculizumab at above labeled dose of 1200 mg every other week. Treatment of this subject with AD-62643 resulted in lowering of LDH levels by day 35 to within reference range. On day 56, eculizumab dose was reduced to labeled dose of 900 mg, every other week. As evidenced by the data presented in FIG. 40, LDH control was maintained out to day 11 in the eculizumab inadequate responder.

[0759] Shown in FIG. 41 is plasma concentration of eculizumab in one subject receiving eculizumab during treatment with AD-62643. The results in FIG. 41 demonstrate that, in one subject, serum knockdown of C5 levels with AD-62643 results in >3×increase in pre-dose eculizumab through levels.

[0760] The results of the Part C of Phase I/II clinical trial indicate that AD-62643 is well tolerated, with most adverse events being mild or moderate in severity. In eculizumab naïve subjects, AD-62643 achieved robust knockdown of the C5 levels, inhibition of complement activity and modest lowering of LDH, but at levels >1.5 ULN. In these patients, normalization of LDH levels was achieved for 4 weeks with a single 600 mg dose of eculizumab following treatment with AD-62643, which represents 25% of eculizumab induction label dose. Therefore, the experimental data supports a reduced eculizumab dose and frequency of administration when this treatment is combined with AD-62643 administration.

[0761] In subjects receiving eculizumab, treatment with AD-62643 also achieved robust knockdown of the C5 levels and inhibition of complement activity. In the eculizumab inadequate responder, AD-62643 demonstrated preliminary evidence of clinical activity by normalizing LDH levels to <1.5×ULN and improving hemoglobin levels and achieving higher eculizumab plasma concentration through levels. This allowed for the lowering of the initial eculizumab dose of 1200 mg to 900 mg administered every other week.

### Example 14: Phase I/II-Extension of Part C Clinical Trial of AD-62643

[0762] Upon completion of dosing with AD-62643 in the study described in Example 13, the investigators initiated eculizumab treatment in eculizumab naïve PNH patients in the setting of ongoing AD-62643 pharmacology (i.e., in the absence of additional dosing of AD-62643) (referred to herein as the “Ecu sparing study”) in order to explore the potential for reducing the dose and frequency of eculizumab administration. Additionally, the investigators initiated a reduction in the frequency of dosing in patients that had previously received eculizumab.

[0763] The patients participating in this part of the study were those described above in Example 13, and included 3 eculizumab naïve patients, 2 background eculizumab patients, and 1 inadequate responder to eculizumab subject (also referred to as a background eculizumab subject). The demographics and background characteristics for these patients at the beginning of the multiple dosing study of AD-62643 described in Example 13 are summarized in Table 29, above, and the dosing schedules for the multiple dosing study of AD-62643 described in Example 13 for each subject are summarized, above, in Table 30. The time between the last dose of AD-62643 and the initiation of the Ecu sparing study varied from subject to subject and ranged from weeks to months. Specifically, for the three eculizumab naive subjects, there were 28, 28, or 7 days between the last AD-62643 dose and start of ecu sparing study. For the three background eculizumab subjects, there were 63, 70 or 70 days between the last eculizumab dose and the start of the ecu sparing study. During the gap, the background eculizumab patients received 900 mg of eculizumab q2W until the start of the ecu sparing study where monthly dosing of eculizumab began.

[0764] As shown in FIG. 42, in the Ecu sparing study, the Ecu naïve patients were administered a single 600 mg dose of eculizumab once every four weeks (Ecu 600 mg q4W), and the background eculizumab patients were transitioned to a spared eculizumab regimen of a single 900 mg dose of eculizumab once every four weeks (Ecu 900 mg q4W). These doses of eculizumab, 600 mg or 900 mg once every four weeks, represent 33% or 50% of the label maintenance dose of eculizumab, respectively. Patients were followed every 2 weeks until study Day 280 and monitored for safety and laboratory parameters including LDH, PD and Ecu PK. FIG. 42 also summarizes the patients, the number of AD-62643 doses received prior to initiation of the Ecu sparing study, and the % of C5 knockdown at the start of the Ecu sparing study.

[0765] There were no serious adverse events or study discontinuations due to adverse events. All six patients reported at least one adverse event, and the majority of reported adverse events were mild to moderate in severity. No other clinically significant changes in vital signs, EKG, physical exams or clinical laboratories (hematology, biochemistry, coagulation, and urinalysis) were observed.

[0766] LDH levels were measured in the subjects and, as shown in FIG. 43, Ecu naïve patients receiving a single 600 mg dose of eculizumab q4W achieved and maintained LDH levels of less than or about 1.5×ULN. FIG. 43 also demonstrates that background eculizumab patients receiving a single 900 mg dose of eculizumab q4W maintained LDH levels less than or about 1.5×ULN. Furthermore, in the background eculizumab patient with prior inadequate eculizumab response, LDH normalization was generally maintained with a 900 mg dose of eculizumab q4W.

[0767] The effect of Ecu sparing on complement activity, measured as classical complement pathway (CCP) activity, was also assessed by determining the amount of active C5b-9 formation, as described above. As demonstrated in FIG. 44A, the CCP level at Day 84 since the start of the Ecu sparing study was 0.3±0.3% for 600 mg q4W patients, and, for the 900 mg q4W patients, the CCP level was 0.4±0.2%. Similar results were observed with an alternative pathway assay (CAP C5b-9 ELISA).

[0768] The effect of Ecu sparing on complement activity as measured by serum hemolytic activity using a sensitized sheep erythrocyte assay (described above) was also assessed. As shown in FIG. 44B, residual sheep red blood cell (sRBC) hemolysis at day 84 since start of Ecu sparing was 0% for the 600 mg q4W patients and 0.4±0.4% for the 900 mg q4W patients.

[0769] Shown in FIG. 45 is plasma concentration of eculizumab in the patients participating in the Ecu sparing study which demonstrate that eculizumab trough levels are sustained with monthly dosing of 600 mg or 900 mg of eculizumab.

[0770] In summary, the study demonstrates that, in eculizumab Ecu naïve patients, normalization of LDH levels was achieved and maintained for up to 6 months with a dose of 600 mg of eculizumab q4W. This dose of eculizumab represents a 67% reduction in the eculizumab label maintenance dose. In background eculizumab patients, maintenance of LDH levels was achieved for 5 months with a dose of 900 mg of eculizumab q4W. This dose of eculizumab represents a 50% reduction in the eculizumab label maintenance dose. In the background eculizumab patient with prior inadequate response at 1200 mg of eculizumab q2W, LDH normalization was maintained with 900 mg q4W. Accordingly, this study demonstrates the efficacy of AD-62643 treatment for patients having PNH as part of a treatment paradigm for reducing the dose and frequency of eculizumab in naïve and background eculizumab patients and for improving disease control in inadequate eculizumab responders.

The application's sequence listing, which the Patent Office published only in electronic form, follows.

SEQUENCE LISTING (2898 sequences)

SEQ ID NO: 1 - DNA, 5480 bp, Homo sapiens
  source 1..5480: mol_type = genomic DNA
tatatccgtggtttcctgctacctccaaccatgggccttttgggaatactttgttttttaatcttcctggggaaaacctggggacaggagcaaacatatgtcatttcagcaccaaaaatattccgtgttggagcatctgaaaatattgtgattcaagtttatggatacactgaagcatttgatgcaacaatctctattaaaagttatcctgataaaaaatttagttactcctcaggccatgttcatttatcctcagagaataaattccaaaactctgcaatcttaacaatacaaccaaaacaattgcctggaggacaaaacccagtttcttatgtgtatttggaagttgtatcaaagcatttttcaaaatcaaaaagaatgccaataacctatgacaatggatttctcttcattcatacagacaaacctgtttatactccagaccagtcagtaaaagttagagtttattcgttgaatgacgacttgaagccagccaaaagagaaactgtcttaactttcatagatcctgaaggatcagaagttgacatggtagaagaaattgatcatattggaattatctcttttcctgacttcaagattccgtctaatcctagatatggtatgtggacgatcaaggctaaatataaagaggacttttcaacaactggaaccgcatattttgaagttaaagaatatgtcttgccacatttttctgtctcaatcgagccagaatataatttcattggttacaagaactttaagaattttgaaattactataaaagcaagatatttttataataaagtagtcactgaggctgacgtttatatcacatttggaataagagaagacttaaaagatgatcaaaaagaaatgatgcaaacagcaatgcaaaacacaatgttgataaatggaattgctcaagtcacatttgattctgaaacagcagtcaaagaactgtcatactacagtttagaagatttaaacaacaagtacctttatattgctgtaacagtcatagagtctacaggtggattttctgaagaggcagaaatacctggcatcaaatatgtcctctctccctacaaactgaatttggttgctactcctcttttcctgaagcctgggattccatatcccatcaaggtgcaggttaaagattcgcttgaccagttggtaggaggagtcccagtaacactgaatgcacaaacaattgatgtaaaccaagagacatctgacttggatccaagcaaaagtgtaacacgtgttgatgatggagtagcttcctttgtgcttaatctcccatctggagtgacggtgctggagtttaatgtcaaaactgatgctccagatcttccagaagaaaatcaggccagggaaggttaccgagcaatagcatactcatctctcagccaaagttacctttatattgattggactgataaccataaggctttgctagtgggagaacatctgaatattattgttacccccaaaagcccatatattgacaaaataactcactataattacttgattttatccaagggcaaaattatccactttggcacgagggagaaattttcagatgcatcttatcaaagtataaacattccagtaacacagaacatggttccttcatcccgacttctggtctattacatcgtcacaggagaacagacagcagaattagtgtctgattcagtctggttaaatattgaagaaaaatgtggcaaccagctccaggttcatctgtctcctgatgcagatgcatattctccaggccaaactgtgtctcttaatatggcaactggaatggattcctgggtggcattagcagcagtggacagtgctgtgtatggagtccaaagaggagccaaaaagcccttggaaagagtatttcaattcttagagaagagtgatctgggctgtggggcaggtggtggcctcaacaatgccaatgtgttccacctagctggacttaccttcctcactaatgcaaatgcagatgactcccaagaaaatgatgaaccttgtaaagaaattctcaggccaagaagaacgctgcaaaagaagatagaagaaatagctgctaaatataaacattcagtagtgaagaaatgttgttacgatggagcctgcgttaataatgatgaaacctgtgagcagcgagctgcacggattagtttagggccaagatgcatcaaagctttcactgaatgttgtgtcgtcgcaagccagctccgtgctaatatctctcataaagacatgcaattgggaaggctacacatgaagaccctgttaccagtaagcaagccagaaattcggagttattttccagaaagctggttgtgggaagttcatcttgttcccagaagaaaacagttgcagtttgccctacctgattctctaaccacctgggaaattcaaggcgttggcatttcaaacactggtatatgtgttgctgatactgtcaaggcaaaggtgttcaaagatgtcttcctggaaatgaatataccatattctgttgtacgaggagaacagatccaattgaaaggaactgtttacaactataggacttctgggatgcagttctgtgttaaaatgtctgctgtggagggaatctgcacttcggaaagcccagtcattgatcatcagggcacaaagtcctccaaatgtgtgcgccagaaagtagagggctcctccagtcacttggtgacattcactgtgcttcctctggaaattggccttcacaacatcaatttttcactggagacttggtttggaaaagaaatcttagtaaaaacattacgagtggtgccagaaggtgtcaaaagggaaagctattctggtgttactttggatcctaggggtatttatggtaccattagcagacgaaaggagttcccatacaggatacccttagatttggtccccaaaacagaaatcaaaaggattttgagtgtaaaaggactgcttgtaggtgagatcttgtctgcagttctaagtcaggaaggcatcaatatcctaacccacctccccaaagggagtgcagaggcggagctgatgagcgttgtcccagtattctatgtttttcactacctggaaacaggaaatcattggaacatttttcattctgacccattaattgaaaagcagaaactgaagaaaaaattaaaagaagggatgttgagcattatgtcctacagaaatgctgactactcttacagtgtgtggaagggtggaagtgctagcacttggttaacagcttttgctttaagagtacttggacaagtaaataaatacgtagagcagaaccaaaattcaatttgtaattctttattgtggctagttgagaattatcaattagataatggatctttcaaggaaaattcacagtatcaaccaataaaattacagggtaccttgcctgttgaagcccgagagaacagcttatatcttacagcctttactgtgattggaattagaaaggctttcgatatatgccccctggtgaaaatcgacacagctctaattaaagctgacaactttctgcttgaaaatacactgccagcccagagcacctttacattggccatttctgcgtatgctctttccctgggagataaaactcacccacagtttcgttcaattgtttcagctttgaagagagaagctttggttaaaggtaatccacccatttatcgtttttggaaagacaatcttcagcataaagacagctctgtacctaacactggtacggcacgtatggtagaaacaactgcctatgctttactcaccagtctgaacttgaaagatataaattatgttaacccagtcatcaaatggctatcagaagagcagaggtatggaggtggcttttattcaacccaggacacaatcaatgccattgagggcctgacggaatattcactcctggttaaacaactccgcttgagtatggacatcgatgtttcttacaagcataaaggtgccttacataattataaaatgacagacaagaatttccttgggaggccagtagaggtgcttctcaatgatgacctcattgtcagtacaggatttggcagtggcttggctacagtacatgtaacaactgtagttcacaaaaccagtacctctgaggaagtttgcagcttttatttgaaaatcgatactcaggatattgaagcatcccactacagaggctacggaaactctgattacaaacgcatagtagcatgtgccagctacaagcccagcagggaagaatcatcatctggatcctctcatgcggtgatggacatctccttgcctactggaatcagtgcaaatgaagaagacttaaaagcccttgtggaaggggtggatcaactattcactgattaccaaatcaaagatggacatgttattctgcaactgaattcgattccctccagtgatttcctttgtgtacgattccggatatttgaactctttgaagttgggtttctcagtcctgccactttcacagtgtacgaataccacagaccagataaacagtgtaccatgttttatagcacttccaatatcaaaattcagaaagtctgtgaaggagccgcgtgcaagtgtgtagaagctgattgtgggcaaatgcaggaagaattggatctgacaatctctgcagagacaagaaaacaaacagcatgtaaaccagagattgcatatgcttataaagttagcatcacatccatcactgtagaaaatgtttttgtcaagtacaaggcaacccttctggatatctacaaaactggggaagctgttgctgagaaagactctgagattaccttcattaaaaaggtaacctgtactaacgctgagctggtaaaaggaagacagtacttaattatgggtaaagaagccctccagataaaatacaatttcagtttcaggtacatctaccctttagattccttgacctggattgaatactggcctagagacacaacatgttcatcgtgtcaagcatttttagctaatttagatgaatttgccgaagatatctttttaaatggatgctaaaattcctgaagttcagctgcatacagtttgcacttatggactcctgttgttgaagttcgtttttttgttttcttctttttttaaacattcatagctggtcttatttgtaaagctcactttacttagaattagtggcacttgcttttattagagaatgatttcaaatgctgtaactttctgaaataacatggccttggagggcatgaagacagatactcctccaaggttattggacaccggaaacaataaattggaacacctcctcaaacctaccactcaggaatgtttgctggggccgaaagaacagtccattgaaagggagtattacaaaaacatggcctttgcttgaaagaaaataccaaggaacaggaaactgatcattaaagcctgagtttgctttcaaaaaaaaaaaaaaaaaa

SEQ ID NO: 2 - DNA, 5384 bp, Macaca mulatta
  variation 2876..2895: note = a, c, t, g, unknown or other
  source 1..5384: mol_type = genomic DNA
catgatttcctgctacctccaaccatgggccttttgggaatactttgttttttaatcttcctgggaaaaacttggggacaggagcaaacatatgtcatttcagcaccaaaaatattccgtgttggagcatctgaaaacattgtgattcaagtttatggatacactgaagcatttgatgcaacaatctctattaaaagttatcctgataaaaaatttagttactcctcaggccatgttcatttatcctcagagaataaattccaaaactcggcagtcttaacaatacaaccaaaacaattacctggaggacaaaaccaagtttcttatgtgtatttggaagttgtatcaaagcatttttcaaaatcaaaaaaaattccaataacctatgacaatggatttctcttcattcatacagacaaacctgtttatactccagaccaatcagtaaaggttagagtttattcgttgaatgatgacttgaagccagccaaaagagaaactgtcttaactttcatagatcctgaaggatcagaaattgacatggtagaagaaattgatcatattggaattatctcttttcctgacttcaagattccgtctaatcctagatatggtatgtggatgatccaggctaaatataaagaggacttttcaacaactggaactgcattttttgaagttaaagaatatgtcttgccacatttttctgtctcagtagaaccagaaagtaatttcattggttataagaactttaagaattttgaaattactataaaagcaagatatttttataataaagtagtcactgaggctgatgtttatatcacatttggaataagagaagacttaaaagatgatcaaaaagaaatgatgcaaacagcaatgcaaaacacaatgttgataaatggaattgctcaagtcacatttgattctgaaacagcagtcaaagaactgtcatactacagtttagaagatttaaacaacaagtacctttatattgctgtaacagtcatagagtctacaggtggattttctgaagaggcagaaatacctggcatcaaatatgtcctctctccctacaaactgaatttggttgctactcctcttttcctgaagcctgggattccatattccatcaaggtgcaggttaaagatgcgcttgaccagttggtaggaggggtcccagtaacactgaatgcacaaacaattgatgtcaaccaagagacatctgacttggagccaaggaaaagtgtaacacgtgttgatgatggagtagcttcgtttgtggttaatctcccatctggagtgacggtgctggagtttaatgtcaaaactgatgctccagatcttccagacgaaaatcaggccagggaaggttaccgagcaatagcatactcatctctcagccaaagttacctttatatcgattggactgataaccacaaggctttgctagtgggagaatatttgaatattattgttacccccaaaagcccatatattgacaaaataactcactataattacttgattttatccaagggcaaaattatccactttggcacaagggagaaactttcagatgcatcttatcaaagtataaacattccagtaacgcagaacatggttccttcatcccgactcctggtctattacatcgtcacaggagagcagacagcagaattagtgtctgattcagtctggttaaatattgaagaaaaatgtggcaaccagctccaggttcatctgtctcctgatgcagatacatattctccaggccaaactgtgtctcttaatatggtaactgggatggattcctgggtggcattaacagcagtggacagcgctgtgtatggagtccaaagaagagccaaaaagcccttggaaagagtatttcaattcttagagaagagtgatctgggctgtggggcaggtggtggcctcaacaatgccaatgtgttccacctagctggacttaccttcctcactaatgcaaatgcagatgactcccaagaaaatgatgaaccttgtaaagaaattatcaggccaagaagaatgctacaagagaagatagaagaaatagctgctaaatataaacatttagtagtgaagaaatgttgttacgatggagtccgtattaatcatgatgaaacctgtgagcagcgagctgcacggattagtgtagggccgagatgcgtcaaagctttcactgaatgttgtgtcgtcgcaagccagctccgtgctaataactctcataaagacttgcaattgggaaggctacacatgaagaccctgttaccagtaagcaagccagaaattcggagttattttccagaaagctggttatgggaagttcatcttgttcccagaagaaaacagttgcagtttgccctacctgattctgtaactacctgggaaattcaaggtgttggcatttcaaacagtggtatatgtgttgctgatactattaaggcaaaggtgttcaaagatgtcttcctggaaatgaatataccatattctgttgtacgaggagaacaggtccagttgaaaggaactgtttacaactataggacttctgggatgcagttctgtgttaaaatgtctgctgtggagggaatctgcacttcagaaagcccagtcattgatcatcagggcacaaagtcctccaaatgtgtgcgacagaaagtagagggctcctctaatcacttggtgacctttactgtgcttcctctggaaattggccttcagaacatcaatttctcactggagacttcgtttggaaaagaaatcttagtaaaatcgttacgagtggtgccagaaggtgtcaaaagggaaagctattctggtattactttggatcctaggggtatttatgnnnnnnnnnnnnnnnnnnnncgaaaggagttcccatacaggataccattagatttggtccccaaaacagaaatcaaaaggattttgagtgtaaaaggactgcttgtaggtgagatcttgtctgcagttctaagtcgggaaggcatcaatatcctaacccacctccccaaagggagtgcagaggcggagctgatgagcgttgtcccagtattctatgtttttcactacctggaaacaggaaatcattggaacatttttcattccgacccattaattgaaaagcggaacctggagaaaaaattaaaagaagggatggtgagcattatgtcctacagaaatgctgactattcttacagcgtgtggaagggtggcagtgctagcacttggttaacagcttttgctttaagagtacttggacaagtacataaatatgtagagcagaaccaaaattcaatatgtaattctttattgtggctggttgagaattatcagttagataatggatccttcaaggaaaattcacagtatcaaccaataaaattacagaaaatcaacacagctctaattaaagctgacacctttctgcttgaaaatacactgccagcccagagcacctttacattggccatttctgcctatgctctttccctgggagataaaactcacccacagttttgttcaattgtttcagctttgaagagagaagctttggttaaaggtaatccacccatttatcgtttttggaaagacagtcttcaacataaagacagctctgtacctaacactggtacagcacgtatggtagaaacaactgcctatgctttactcaccagtctgaacttgaaagacataaattatgttaacccaatcatcaaatggctatcagaagagcagaggtatggaggtggcttttattcaacccaggacacaatcaatgccatcgagggcctgacagaatattcactcctggttaaacagctccgcttgaatatggacatcgatgttgcttacaagcataaaggtcccttacataattataaaatgacagacaagaatttccttgggaggccagtagaggtgcttctcaatgatgacctcgttgtcagtacaggatttggcagtggcttggctacggtacatgtaacaactgtagttcacaaaaccagtacctctgaggaagtttgcagcttttatttgaaaattgatactcaggatattgaagcatcccactacagaggctacggaaactctgattacaaacgcatagtagcatgtgccagctacaagcccagcaaggaagaatcatcttctggatcctctcatgcagtgatggacatctccttgcctactggaatcaatgcaaatgaagaagacttaaaagctcttgtggaaggggtggatcagctattcactgattaccaaataaaagatggacatgttattctgcaactgaattcgatcccctccagtgatttcctttgtgtacgattccggatttttgaactctttgaagttgggtttcttagtcctgccactttcacagtgtatgaataccacagaccagataaacagtgtaccatgttttatagcacttccaatatcaaaattcagaaagtctgtgaaggagccacgtgcaagtgtatagaagctgattgtgggcaaatgcagaaagaattggatctgacaatctctgcagagactagaaaacaaacagcatgtaacccagagattgcatatgcttataaagttatcatcacatccatcactacagaaaatgtttttgtcaagtacaaggcaacccttctggatatctacaaaactggggaagctgttgctgaaaaagactctgaaatcaccttcattaaaaaggtaacctgcactaacgctgagctggtgaaaggaagacagtacttaattatggggaaagaagctctccagataaaatacaatttcactttcaggtacatctaccctttagattccttgacctggattgaatactggcctagagacacaacatgttcatcgtgtcaagcatttttagctaatttagatgaatttgctgaagacatctttttaaatggatgctaaaattcctgaagttcagctgcatacagtttgcacttatggactcctgttgttgaagtttgtttttttttctcgtttttttgtctttaaacattcacagctggtcttatttgtaaagctcactttacttagaattagtggcacttgcttttattagagaatgattttaaacgctgtaactttctgaaataacatggccttggagggcatgaagacagatactcctccaaggttattggacaccggaaacaataaattagaacacctcctcaaacctaccacttaggaatgtttgctggagccgaaagaacagtccattgaaatggagtattacaaaaacatggcctttgcttgaaagaaaataccaggggacaggaaactgatcattaaagcctgagtttgctttcaaactgtgctaaaaa

SEQ ID NO: 3 - DNA, 5448 bp, Mus musculus
  source 1..5448: mol_type = genomic DNA
tttaaaaggaaagtggttacagggaggccatgcccatgggtttatgccgctaccagccatgggtctttggggaatactttgtcttttaattttcctggacaaaacttggggacaggaacaaacctacgtcatttcagcacccaaaatcctccgggtcggctcgtctgaaaatgtggtaattcaagtccatggctacactgaagcatttgatgcaactctttctctaaaaagctatcctgacaaaaaagtcaccttctcttcaggctatgttaatttgtccccggaaaacaaattccaaaacgcggcactgttgacactacagcccaatcaagttcctagagaagaaagcccagtctctcacgtgtatctggaagttgtgtcaaaacacttttcaaaatcaaagaaaataccaattacctataacaatggaattctcttcatccatacagacaaacctgtttacacgccggaccagtcagtaaagatcagagtctattctctgggtgacgacttgaagccagccaaacgggagactgtcttaactttcatagaccccgaaggatcagaagttgacattgtagaagaaaatgattacaccggaattatctcttttcctgacttcaagattccatctaatcccaagtatggtgtttggacaattaaagctaactataagaaggattttacaacaactggaactgcatactttgaaattaaagaatatgtcttgccacgattctctgtttcaatagaactagaaagaaccttcattggctataaaaactttaagaactttgaaatcactgtgaaagcaagatatttttataataaagtggtacctgatgctgaagtgtatgccttttttggattgagagaggacataaaagatgaggagaagcagatgatgcacaaagccacacaagccgcaaagttggttgacggagttgctcagatctcttttgattctgaaacagcagttaaagagctgtcctacaacagtctagaagacttaaacaacaagtacctttatattgcagtaacagtcacagaatcttcaggtggattttcagaagaggcagaaatccctggagtcaaatatgtcctctctccctacacactgaatttggtcgctactcctcttttcgtgaagcccgggattccattttccatcaaggcacaggttaaagattcactcgagcaggcggtaggaggggtcccagtaactctgatggcacaaacagtcgatgtgaatcaagagacatctgacttggaaacaaagaggagcatcactcatgacactgatggagtagctgtgtttgtgctgaacctcccatcaaatgtgacggtgctaaagtttgagatcagaactgatgacccagaacttcccgaagaaaatcaagccagcaaagagtacgaagcagttgcgtactcgtctctcagccaaagttacatttacatcgcttggactgaaaactacaagcccatgcttgtgggagaatacctgaatattatggttacccccaagagcccatatatcgacaaaataactcactataattacttgattttatccaaaggcaaaattgtacagtacggcacaagagagaaacttttctcctcaacttatcaaaatataaatattccagtgacacagaacatggttccttcagcacgactcctggtctattacatagtcacaggggagcaaacagcagaattagtggctgacgcagtctggataaatattgaggagaagtgtggcaaccagctccaggtccatctgtctccagatgaatatgtgtattctccaggccaaactgtgtcccttgacatggtgactgaagcagactcatgggtagcactatcagcagtggacagagctgtgtataaagtccagggaaacgccaaaagggccatgcaaagagtctttcaagctttggatgaaaagagtgacctgggctgtggggcaggtggtggccatgacaatgcagatgtattccatctagctgggctcaccttcctcaccaacgcaaacgcagatgactcccattatcgtgatgactcttgtaaagaaattctcaggtcaaagagaaacctgcatctcctaaggcagaaaatagaagaacaagctgctaagtacaaacatagtgtgccaaagaaatgctgctatgacggagcccgagtgaacttctacgaaacctgtgaggagcgagtggcccgggttaccataggccctctctgcatcagggccttcaacgagtgctgtactattgcgaacaagatccgaaaagaaagcccccataaacctgtccaactgggaaggatccacattaagaccctgttaccagtgatgaaggcagatatccgaagctactttccagagagctggctatgggaaattcatcgcgttcccaaaagaaaacagctgcaggtcacgctgcctgactcactaacgacttgggaaattcaaggcattggcatttcagacaatggtatatgtgttgctgatacactcaaggcaaaggtgttcaaagaagtcttcctggagatgaacataccatattctgttgtgcgaggagaacagatccaattgaaaggaactgtttacaactatatgacctcagggacaaagttctgtgttaaaatgtctgctgtggaggggatctgcacttcaggaagctcagctgctagccttcacacctccaggccctccagatgtgtgttccagaggatagagggctcgtccagtcacttggtgaccttcaccctgcttcctctggaaattggccttcactccataaacttctcactagagacctcatttgggaaagacatcttagtaaagacattacgggtagtgccagaaggagtcaagagggaaagctatgccggcgtgattctggaccctaagggaattcgtggtattgttaacagacgaaaggaattcccatacaggatcccattagatttggtccccaagaccaaagttgaaaggattttgagtgtcaaaggactgcttgtaggggagttcttgtccacggttctgagtaaggaaggcatcaacatcctaacccacctccccaagggcagtgcagaggcagagctcatgagcatagctccggtgttctatgttttccactacctggaagcaggaaaccattggaatattttctatcctgatacactgagtaaaagacagagcctggagaaaaaaataaaacaaggggtggtgagcgtcatgtcctacagaaacgctgactattcctacagcatgtggaagggggcgagcgctagtacctggctgacagcttttgctctgagagtgcttggacaggtggccaagtatgtaaaacaggatgaaaactcaatttgtaactctttgctatggctggttgagaagtgtcagctggaaaacggctctttcaaggaaaattcccaatatctaccaataaaattacagggtactttgcctgctgaagcccaagagaaaactttgtatcttacagccttttctgtgattggaattagaaaggcagttgacatatgccccaccatgaaaatccacacagcgctagataaagccgactccttcctgcttgaaaacaccctgccatccaagagcaccttcacactggccattgtagcctatgctctttccctaggagacagaacccacccgaggtttcgtctaattgtgtcggccctgaggaaggaagcttttgttaaaggtgatccgcccatttaccgttactggagagataccctcaaacgtccagacagctctgtgcccagcagcggcacagcaggtatggttgaaaccacagcctatgctttgctcgccagcctgaaactgaaggatatgaattacgccaaccccatcatcaagtggctatctgaagagcagaggtatggaggcggcttttattccacccaggatacgattaatgccatcgagggcctgacagaatattcactcctgttaaaacaaattcatttggatatggacatcaatgtcgcctacaaacacgaaggtgacttccacaagtataaggtgacagagaagcatttcctggggaggccagtggaggtatctctcaatgatgaccttgttgtcagcacaggctacagcagtggcttggccacagtatatgtaaaaactgtggttcacaaaattagtgtctctgaggaattttgcagcttttacttgaaaattgatacccaagatattgaagcatccagccacttcaggctcagtgactctggattcaagcgcataatagcatgtgccagctacaagcccagcaaggaggagtcaacatccgggtcctcccatgcagtaatggatatatcactgccgactggaatcggagcaaacgaggaagatttacgggctcttgtggaaggagtggatcaactactaactgattaccagatcaaagatggccatgtcattctgcaactgaattcgatcccctccagagatttcctctgtgtccggttccggatatttgaacttttccaagttgggtttctgaatcctgctaccttcacggtgtacgagtatcacagaccagataagcagtgcaccatgatttatagcatttctgacaccaggcttcagaaagtctgtgaaggagcagcttgcacatgtgtggaagctgactgtgcgcaactgcaggcagaagtagacctagccatctctgcagactccagaaaagagaaagcctgtaaaccagagactgcatatgcttataaagtcaggatcacatcagccactgaagaaaatgtttttgtcaagtacactgcgactcttctggtcacttacaaaacaggggaagctgctgatgagaattcggaggtcaccttcattaaaaagatgagctgtaccaatgccaacctggtgaaagggaagcagtatttaatcatgggcaaagaggttctgcagatcaaacacaatttcagtttcaagtatatataccctctagattcctccacctggattgaatattggcccacagacacaacgtgtccatcctgtcaagcatttgtagagaatttgaataactttgctgaagacctctttttaaacagctgtgaatgaaaagttctgctgcacgaagattcctcctgcggcggggggattgctcctcctctggcttggaaacctagcctagaatcagatacactttctttagagtaaagcacaagctgatgagttacgactttgtgaaatggatagccttgaggggaggcgaaaacaggtcccccaaggctatcagatgtcagtgccaatagactgaaacaagtctgtaaagttagcagtcaggggtgttggttggggccggaagaagagacccactgaaactgtagccccttatcaaaacatatccttgcttgaaagaaaaataccaaggacagaaaatgccataaaatcttgactttgcactc

SEQ ID NO: 4 - DNA, 4497 bp, Rattus norvegicus
  source 1..4497: mol_type = genomic DNA
atggatagcacagagaccgacagatgtcctacagcccgccatcatctttccggaaacattaactcagtgcttgctgcccttgtaggtgggttttcggaagaggcagaaattcctggcatcaaatacgtcctctctccctatacactgaatttggtcgctacccctcttttcctgaagcctgggattccattttccatcaaggtacaggttaaggattcactcgagcagttggtaggaggggtcccagtaactctgatggcacaaacagtcaatgtgaatcaagagacatctgacttggaaccaaagaggagcatcacacactctgctgatggagtggcttcatttgtggtgaacctcccatcagaagtgacatcactgaagtttgaggtcaaaactgatgccccggaacttcccgaagaaaatcaagccagcaaagaatatgaagcagttacatactcatccctcagccagagttacatttacattggctggactgaaaactacaagcccatgcttgtgggagaatatctgaatattatcgtcacccccaagagtccatatattgacaaaataactcactataattacttgattttatccaaaggcaaaattgtacagtatggcacaaaggagaaacttctctattcatcttatcaaaatataaacatcccagtgacacaggacatggttccttcagcgcggctcctggtctattacatagtcacgggggagcagacagcagaattggtggctgacgcagtctggataaacattgaggagaagtgtggcaaccagctccaggtccatctgtctccagataaagacgtgtattctccaggccaaactgtgtcccttgacatggtgactgaagcagactcatgggtggcactatctgcggtggacagcgctgtgtatggagtccggggaaaagccaaaagggccatgcaaagagtgttccaagcttttgatgacaagagtgacctgggctgtggggcaggtggtggccgtgacaatgtagatgtattccatctagctgggctcaccttcctcaccaatgcaaacgcagatgactcccaataccacgatgactcttgtaaggaaattctcaggccaaagagagacctgcagctcctgcatcagaaagtggaagaacaagctgctaaatacaaacaccgtgtgcccaagaaatgctgttatgatggagcccgagaaaacaaatacgaaacctgtgagcagcgagttgcccgggtgaccataggcccacactgcatcagggccttcaacgagtgttgtactattgcggataagatccgaaaagaaagccaccacaaaggcatgctgttgggaaggatccaaataaaggccctgttaccagtgatgaaggcagaaatccgaagctactttccagagagctggctatgggaagttcatcgtgttcccaaaagaaaccagctgcaggttgcactgcctgactcactgacgacctgggaaattcaaggcatcggcatctcagacaatggtatatgtgttgctgacacactcaaggcaaaggtgttcaaagatgtcttcctggagatgaacataccatattctgttgtacgaggggagcagatccaattgaagggaaccgtttacaattataggacctctgggacaatgttctgtgttaaaatgtctgccgtggagggaatctgcactccaggaagctcggctgctagccctcagacctctaggtcctccagatgtgtgcgccagagaatagagggctcctccagtcacttggtgaccttcagcctgcttcctctggaaattggccttcactccataaacttctcactagagacttcatttgggaaagaaatcttagtgaagacattacgggtagtgccagaagggatcaaaagggaaagctatgctggtgtgactctggaccccaggggagtttatggtattgttaacagacgaaaggaattcccatacaggataccattagatttggtccccaaaaccaacgtcaaaaggattttgagtgtaaaaggactgcttataggggaattcttgtccacggttctgagtaaagaaggcatcgacatcctaacccacctccccaagggcagcgccgaggcagaactcatgagcatagtcccggtgttctacgttttccactacctggaagcaggaaaccattggaatattttccaccctgatacgttagctagaaaacagagcctgcagaaaaaaataaaagaagggctggtgagcgtcatgtcctacagaaacgctgactattcctacagcatgtggaagggagcaagctctagtgcctggctgacagcttttgctctgagagtgcttggacaggtgaacaagtatgtgaaacaagaccaatactcgatctgtaactccttgttatggctgattgagaagtgtcagctggaaaacggatctttcaaggaaaattcccaatatctaccaataaaattacagggtactttgcctgctgaagcccaagagaacactttatatcttacagccttttctgtgattggaattagaaaggctattggcatatgccccacggagaaaatctacacagcgctggctaaagctgactccttcctacttgaaaggaccctgccttccaagagcaccttcaccctggccattgtggcctatgctctctccctgggagacagaacccacccgaagtttcgttctattgtgtcagccctgaagagggaagctttggttaaaggagacccgcccatttaccgtttctggagagacactctccaacgtccagacagctcagcacccaacagcggcacagcaggtatggtagaaaccacggcctatgctttgctcaccagcctgaacctgaaggagacgagttatgtcaacccgatcatcaagtggctatctgaggagcagaggtatggaggcggcttttattccacccaggataccattaacgccatcgagggcctgacagagtattcactcctggttaaacaacttcatttggatatggatatcaatgtctcctacaaacacaaaggggatttctaccagtataaagtgacagagaagaacttcctcgggaggccagtggaggtacccctcaatgatgacctcatcgtcaccacaggctatagcagtggcttggctacagtatatgtaaaaactgtggttcacaaaactagtgtcgctgaggaattttgcagcttttacttgaaaattgatacccaagaagttgaagcctccagctacctcagctacagtgactcgggacacaagcgcataatagcctgtgccagctacaagcccagcaaggaggagtcagcatctgggtcctcccatgcagtaatggatatactgctgccgaccggaatcggagcaaaccaagaagatttacgagctcttgtggaaggagtagatcaactcctaactgattaccagatcaaagacagtcatgttattctgcaattgaattcgattccctccagagatttcctttgtgttcggttccggatatttgaacttttccaagttgggtttctgaatcctgctacgttcacggtgtacgagtatcacagaccagataagcagtgtaccatgatttacagcacttctgacaccaaccttcagagagtctgtgaaggagcggcatgcaaatgcgttgaagctgattgtgggcaactgcaggcagaactggacctggccatctctgcagacaccaggaaagaaacagcatgtaaaccagagattgcatatgcttataaggtcaggatcacgtcggccacggaagaaaacatttttgtcaagtacactgcgacgcttctggatatttacaaaacaggggaagccgctgctgagaaggactctgagatcaccttcattaaaaagataagctgtaccaacgccaacctggtgaaaggaaagcaatatttaatcatgggcaaagaggctctgcagatcaaacacaatttcagtttcaagtatatataccctctagattcctccacctggattgaatattggcccacagacacaacgtgtccatcctgccaagcgtttgtagctaatttggacgagttcgctgaagacatctttctaaatggctgtgaaaatgcctgaggaagttctgctgcgtggccttcccgggtactcctgttggtggctcctaggagccaggatcgcttggaaacttagcctagaatcggatacattttctttatagtaaagcgtaagttgaagagttactttgtgaaacaaaatagccttgtggagagccgaaggcaggtcccccaaggctattggacatcagcaccaataagctggaacaagtctgtaacgttagcagccaggggtgtttgttggggccggaagaagagactcactgaaattgtagccccttaggaaaacatggtcttgcttgaaaaaaaaaataccaaggacagaaaatgccataaaagcttgactttgcactcaactgta

SEQ ID NO: 5 - DNA, 5480 bp, Homo sapiens
  source 1..5480: mol_type = genomic DNA
ttttttttttttttttttgaaagcaaactcaggctttaatgatcagtttcctgttccttggtattttctttcaagcaaaggccatgtttttgtaatactccctttcaatggactgttctttcggccccagcaaacattcctgagtggtaggtttgaggaggtgttccaatttattgtttccggtgtccaataaccttggaggagtatctgtcttcatgccctccaaggccatgttatttcagaaagttacagcatttgaaatcattctctaataaaagcaagtgccactaattctaagtaaagtgagctttacaaataagaccagctatgaatgtttaaaaaaagaagaaaacaaaaaaacgaacttcaacaacaggagtccataagtgcaaactgtatgcagctgaacttcaggaattttagcatccatttaaaaagatatcttcggcaaattcatctaaattagctaaaaatgcttgacacgatgaacatgttgtgtctctaggccagtattcaatccaggtcaaggaatctaaagggtagatgtacctgaaactgaaattgtattttatctggagggcttctttacccataattaagtactgtcttccttttaccagctcagcgttagtacaggttacctttttaatgaaggtaatctcagagtctttctcagcaacagcttccccagttttgtagatatccagaagggttgccttgtacttgacaaaaacattttctacagtgatggatgtgatgctaactttataagcatatgcaatctctggtttacatgctgtttgttttcttgtctctgcagagattgtcagatccaattcttcctgcatttgcccacaatcagcttctacacacttgcacgcggctccttcacagactttctgaattttgatattggaagtgctataaaacatggtacactgtttatctggtctgtggtattcgtacactgtgaaagtggcaggactgagaaacccaacttcaaagagttcaaatatccggaatcgtacacaaaggaaatcactggagggaatcgaattcagttgcagaataacatgtccatctttgatttggtaatcagtgaatagttgatccaccccttccacaagggcttttaagtcttcttcatttgcactgattccagtaggcaaggagatgtccatcaccgcatgagaggatccagatgatgattcttccctgctgggcttgtagctggcacatgctactatgcgtttgtaatcagagtttccgtagcctctgtagtgggatgcttcaatatcctgagtatcgattttcaaataaaagctgcaaacttcctcagaggtactggttttgtgaactacagttgttacatgtactgtagccaagccactgccaaatcctgtactgacaatgaggtcatcattgagaagcacctctactggcctcccaaggaaattcttgtctgtcattttataattatgtaaggcacctttatgcttgtaagaaacatcgatgtccatactcaagcggagttgtttaaccaggagtgaatattccgtcaggccctcaatggcattgattgtgtcctgggttgaataaaagccacctccatacctctgctcttctgatagccatttgatgactgggttaacataatttatatctttcaagttcagactggtgagtaaagcataggcagttgtttctaccatacgtgccgtaccagtgttaggtacagagctgtctttatgctgaagattgtctttccaaaaacgataaatgggtggattacctttaaccaaagcttctctcttcaaagctgaaacaattgaacgaaactgtgggtgagttttatctcccagggaaagagcatacgcagaaatggccaatgtaaaggtgctctgggctggcagtgtattttcaagcagaaagttgtcagctttaattagagctgtgtcgattttcaccagggggcatatatcgaaagcctttctaattccaatcacagtaaaggctgtaagatataagctgttctctcgggcttcaacaggcaaggtaccctgtaattttattggttgatactgtgaattttccttgaaagatccattatctaattgataattctcaactagccacaataaagaattacaaattgaattttggttctgctctacgtatttatttacttgtccaagtactcttaaagcaaaagctgttaaccaagtgctagcacttccacccttccacacactgtaagagtagtcagcatttctgtaggacataatgctcaacatcccttcttttaattttttcttcagtttctgcttttcaattaatgggtcagaatgaaaaatgttccaatgatttcctgtttccaggtagtgaaaaacatagaatactgggacaacgctcatcagctccgcctctgcactccctttggggaggtgggttaggatattgatgccttcctgacttagaactgcagacaagatctcacctacaagcagtccttttacactcaaaatccttttgatttctgttttggggaccaaatctaagggtatcctgtatgggaactcctttcgtctgctaatggtaccataaatacccctaggatccaaagtaacaccagaatagctttcccttttgacaccttctggcaccactcgtaatgtttttactaagatttcttttccaaaccaagtctccagtgaaaaattgatgttgtgaaggccaatttccagaggaagcacagtgaatgtcaccaagtgactggaggagccctctactttctggcgcacacatttggaggactttgtgccctgatgatcaatgactgggctttccgaagtgcagattccctccacagcagacattttaacacagaactgcatcccagaagtcctatagttgtaaacagttcctttcaattggatctgttctcctcgtacaacagaatatggtatattcatttccaggaagacatctttgaacacctttgccttgacagtatcagcaacacatataccagtgtttgaaatgccaacgccttgaatttcccaggtggttagagaatcaggtagggcaaactgcaactgttttcttctgggaacaagatgaacttcccacaaccagctttctggaaaataactccgaatttctggcttgcttactggtaacagggtcttcatgtgtagccttcccaattgcatgtctttatgagagatattagcacggagctggcttgcgacgacacaacattcagtgaaagctttgatgcatcttggccctaaactaatccgtgcagctcgctgctcacaggtttcatcattattaacgcaggctccatcgtaacaacatttcttcactactgaatgtttatatttagcagctatttcttctatcttcttttgcagcgttcttcttggcctgagaatttctttacaaggttcatcattttcttgggagtcatctgcatttgcattagtgaggaaggtaagtccagctaggtggaacacattggcattgttgaggccaccacctgccccacagcccagatcactcttctctaagaattgaaatactctttccaagggctttttggctcctctttggactccatacacagcactgtccactgctgctaatgccacccaggaatccattccagttgccatattaagagacacagtttggcctggagaatatgcatctgcatcaggagacagatgaacctggagctggttgccacatttttcttcaatatttaaccagactgaatcagacactaattctgctgtctgttctcctgtgacgatgtaatagaccagaagtcgggatgaaggaaccatgttctgtgttactggaatgtttatactttgataagatgcatctgaaaatttctccctcgtgccaaagtggataattttgcccttggataaaatcaagtaattatagtgagttattttgtcaatatatgggcttttgggggtaacaataatattcagatgttctcccactagcaaagccttatggttatcagtccaatcaatataaaggtaactttggctgagagatgagtatgctattgctcggtaaccttccctggcctgattttcttctggaagatctggagcatcagttttgacattaaactccagcaccgtcactccagatgggagattaagcacaaaggaagctactccatcatcaacacgtgttacacttttgcttggatccaagtcagatgtctcttggtttacatcaattgtttgtgcattcagtgttactgggactcctcctaccaactggtcaagcgaatctttaacctgcaccttgatgggatatggaatcccaggcttcaggaaaagaggagtagcaaccaaattcagtttgtagggagagaggacatatttgatgccaggtatttctgcctcttcagaaaatccacctgtagactctatgactgttacagcaatataaaggtacttgttgtttaaatcttctaaactgtagtatgacagttctttgactgctgtttcagaatcaaatgtgacttgagcaattccatttatcaacattgtgttttgcattgctgtttgcatcatttctttttgatcatcttttaagtcttctcttattccaaatgtgatataaacgtcagcctcagtgactactttattataaaaatatcttgcttttatagtaatttcaaaattcttaaagttcttgtaaccaatgaaattatattctggctcgattgagacagaaaaatgtggcaagacatattctttaacttcaaaatatgcggttccagttgttgaaaagtcctctttatatttagccttgatcgtccacataccatatctaggattagacggaatcttgaagtcaggaaaagagataattccaatatgatcaatttcttctaccatgtcaacttctgatccttcaggatctatgaaagttaagacagtttctcttttggctggcttcaagtcgtcattcaacgaataaactctaacttttactgactggtctggagtataaacaggtttgtctgtatgaatgaagagaaatccattgtcataggttattggcattctttttgattttgaaaaatgctttgatacaacttccaaatacacataagaaactgggttttgtcctccaggcaattgttttggttgtattgttaagattgcagagttttggaatttattctctgaggataaatgaacatggcctgaggagtaactaaattttttatcaggataacttttaatagagattgttgcatcaaatgcttcagtgtatccataaacttgaatcacaatattttcagatgctccaacacggaatatttttggtgctgaaatgacatatgtttgctcctgtccccaggttttccccaggaagattaaaaaacaaagtattcccaaaaggcccatggttggaggtagcaggaaaccacggatata

SEQ ID NO: 6 - DNA, 5384 bp, Macaca mulatta
  variation 2490..2509: note = a, c, t, g, unknown or other
  source 1..5384: mol_type = genomic DNA
tttttagcacagtttgaaagcaaactcaggctttaatgatcagtttcctgtcccctggtattttctttcaagcaaaggccatgtttttgtaatactccatttcaatggactgttctttcggctccagcaaacattcctaagtggtaggtttgaggaggtgttctaatttattgtttccggtgtccaataaccttggaggagtatctgtcttcatgccctccaaggccatgttatttcagaaagttacagcgtttaaaatcattctctaataaaagcaagtgccactaattctaagtaaagtgagctttacaaataagaccagctgtgaatgtttaaagacaaaaaaacgagaaaaaaaaacaaacttcaacaacaggagtccataagtgcaaactgtatgcagctgaacttcaggaattttagcatccatttaaaaagatgtcttcagcaaattcatctaaattagctaaaaatgcttgacacgatgaacatgttgtgtctctaggccagtattcaatccaggtcaaggaatctaaagggtagatgtacctgaaagtgaaattgtattttatctggagagcttctttccccataattaagtactgtcttcctttcaccagctcagcgttagtgcaggttacctttttaatgaaggtgatttcagagtctttttcagcaacagcttccccagttttgtagatatccagaagggttgccttgtacttgacaaaaacattttctgtagtgatggatgtgatgataactttataagcatatgcaatctctgggttacatgctgtttgttttctagtctctgcagagattgtcagatccaattctttctgcatttgcccacaatcagcttctatacacttgcacgtggctccttcacagactttctgaattttgatattggaagtgctataaaacatggtacactgtttatctggtctgtggtattcatacactgtgaaagtggcaggactaagaaacccaacttcaaagagttcaaaaatccggaatcgtacacaaaggaaatcactggaggggatcgaattcagttgcagaataacatgtccatcttttatttggtaatcagtgaatagctgatccaccccttccacaagagcttttaagtcttcttcatttgcattgattccagtaggcaaggagatgtccatcactgcatgagaggatccagaagatgattcttccttgctgggcttgtagctggcacatgctactatgcgtttgtaatcagagtttccgtagcctctgtagtgggatgcttcaatatcctgagtatcaattttcaaataaaagctgcaaacttcctcagaggtactggttttgtgaactacagttgttacatgtaccgtagccaagccactgccaaatcctgtactgacaacgaggtcatcattgagaagcacctctactggcctcccaaggaaattcttgtctgtcattttataattatgtaagggacctttatgcttgtaagcaacatcgatgtccatattcaagcggagctgtttaaccaggagtgaatattctgtcaggccctcgatggcattgattgtgtcctgggttgaataaaagccacctccatacctctgctcttctgatagccatttgatgattgggttaacataatttatgtctttcaagttcagactggtgagtaaagcataggcagttgtttctaccatacgtgctgtaccagtgttaggtacagagctgtctttatgttgaagactgtctttccaaaaacgataaatgggtggattacctttaaccaaagcttctctcttcaaagctgaaacaattgaacaaaactgtgggtgagttttatctcccagggaaagagcataggcagaaatggccaatgtaaaggtgctctgggctggcagtgtattttcaagcagaaaggtgtcagctttaattagagctgtgttgattttctgtaattttattggttgatactgtgaattttccttgaaggatccattatctaactgataattctcaaccagccacaataaagaattacatattgaattttggttctgctctacatatttatgtacttgtccaagtactcttaaagcaaaagctgttaaccaagtgctagcactgccacccttccacacgctgtaagaatagtcagcatttctgtaggacataatgctcaccatcccttcttttaattttttctccaggttccgcttttcaattaatgggtcggaatgaaaaatgttccaatgatttcctgtttccaggtagtgaaaaacatagaatactgggacaacgctcatcagctccgcctctgcactccctttggggaggtgggttaggatattgatgccttcccgacttagaactgcagacaagatctcacctacaagcagtccttttacactcaaaatccttttgatttctgttttggggaccaaatctaatggtatcctgtatgggaactcctttcgnnnnnnnnnnnnnnnnnnnncataaatacccctaggatccaaagtaataccagaatagctttcccttttgacaccttctggcaccactcgtaacgattttactaagatttcttttccaaacgaagtctccagtgagaaattgatgttctgaaggccaatttccagaggaagcacagtaaaggtcaccaagtgattagaggagccctctactttctgtcgcacacatttggaggactttgtgccctgatgatcaatgactgggctttctgaagtgcagattccctccacagcagacattttaacacagaactgcatcccagaagtcctatagttgtaaacagttcctttcaactggacctgttctcctcgtacaacagaatatggtatattcatttccaggaagacatctttgaacacctttgccttaatagtatcagcaacacatataccactgtttgaaatgccaacaccttgaatttcccaggtagttacagaatcaggtagggcaaactgcaactgttttcttctgggaacaagatgaacttcccataaccagctttctggaaaataactccgaatttctggcttgcttactggtaacagggtcttcatgtgtagccttcccaattgcaagtctttatgagagttattagcacggagctggcttgcgacgacacaacattcagtgaaagctttgacgcatctcggccctacactaatccgtgcagctcgctgctcacaggtttcatcatgattaatacggactccatcgtaacaacatttcttcactactaaatgtttatatttagcagctatttcttctatcttctcttgtagcattcttcttggcctgataatttctttacaaggttcatcattttcttgggagtcatctgcatttgcattagtgaggaaggtaagtccagctaggtggaacacattggcattgttgaggccaccacctgccccacagcccagatcactcttctctaagaattgaaatactctttccaagggctttttggctcttctttggactccatacacagcgctgtccactgctgttaatgccacccaggaatccatcccagttaccatattaagagacacagtttggcctggagaatatgtatctgcatcaggagacagatgaacctggagctggttgccacatttttcttcaatatttaaccagactgaatcagacactaattctgctgtctgctctcctgtgacgatgtaatagaccaggagtcgggatgaaggaaccatgttctgcgttactggaatgtttatactttgataagatgcatctgaaagtttctcccttgtgccaaagtggataattttgcccttggataaaatcaagtaattatagtgagttattttgtcaatatatgggcttttgggggtaacaataatattcaaatattctcccactagcaaagccttgtggttatcagtccaatcgatataaaggtaactttggctgagagatgagtatgctattgctcggtaaccttccctggcctgattttcgtctggaagatctggagcatcagttttgacattaaactccagcaccgtcactccagatgggagattaaccacaaacgaagctactccatcatcaacacgtgttacacttttccttggctccaagtcagatgtctcttggttgacatcaattgtttgtgcattcagtgttactgggacccctcctaccaactggtcaagcgcatctttaacctgcaccttgatggaatatggaatcccaggcttcaggaaaagaggagtagcaaccaaattcagtttgtagggagagaggacatatttgatgccaggtatttctgcctcttcagaaaatccacctgtagactctatgactgttacagcaatataaaggtacttgttgtttaaatcttctaaactgtagtatgacagttctttgactgctgtttcagaatcaaatgtgacttgagcaattccatttatcaacattgtgttttgcattgctgtttgcatcatttctttttgatcatcttttaagtcttctcttattccaaatgtgatataaacatcagcctcagtgactactttattataaaaatatcttgcttttatagtaatttcaaaattcttaaagttcttataaccaatgaaattactttctggttctactgagacagaaaaatgtggcaagacatattctttaacttcaaaaaatgcagttccagttgttgaaaagtcctctttatatttagcctggatcatccacataccatatctaggattagacggaatcttgaagtcaggaaaagagataattccaatatgatcaatttcttctaccatgtcaatttctgatccttcaggatctatgaaagttaagacagtttctcttttggctggcttcaagtcatcattcaacgaataaactctaacctttactgattggtctggagtataaacaggtttgtctgtatgaatgaagagaaatccattgtcataggttattggaattttttttgattttgaaaaatgctttgatacaacttccaaatacacataagaaacttggttttgtcctccaggtaattgttttggttgtattgttaagactgccgagttttggaatttattctctgaggataaatgaacatggcctgaggagtaactaaattttttatcaggataacttttaatagagattgttgcatcaaatgcttcagtgtatccataaacttgaatcacaatgttttcagatgctccaacacggaatatttttggtgctgaaatgacatatgtttgctcctgtccccaagtttttcccaggaagattaaaaaacaaagtattcccaaaaggcccatggttggaggtagcaggaaatcatg

SEQ ID NO: 7 - DNA, 5448 bp, Mus musculus
  source 1..5448: mol_type = genomic DNA
gagtgcaaagtcaagattttatggcattttctgtccttggtatttttctttcaagcaaggatatgttttgataaggggctacagtttcagtgggtctcttcttccggccccaaccaacacccctgactgctaactttacagacttgtttcagtctattggcactgacatctgatagccttgggggacctgttttcgcctcccctcaaggctatccatttcacaaagtcgtaactcatcagcttgtgctttactctaaagaaagtgtatctgattctaggctaggtttccaagccagaggaggagcaatccccccgccgcaggaggaatcttcgtgcagcagaacttttcattcacagctgtttaaaaagaggtcttcagcaaagttattcaaattctctacaaatgcttgacaggatggacacgttgtgtctgtgggccaatattcaatccaggtggaggaatctagagggtatatatacttgaaactgaaattgtgtttgatctgcagaacctctttgcccatgattaaatactgcttccctttcaccaggttggcattggtacagctcatctttttaatgaaggtgacctccgaattctcatcagcagcttcccctgttttgtaagtgaccagaagagtcgcagtgtacttgacaaaaacattttcttcagtggctgatgtgatcctgactttataagcatatgcagtctctggtttacaggctttctcttttctggagtctgcagagatggctaggtctacttctgcctgcagttgcgcacagtcagcttccacacatgtgcaagctgctccttcacagactttctgaagcctggtgtcagaaatgctataaatcatggtgcactgcttatctggtctgtgatactcgtacaccgtgaaggtagcaggattcagaaacccaacttggaaaagttcaaatatccggaaccggacacagaggaaatctctggaggggatcgaattcagttgcagaatgacatggccatctttgatctggtaatcagttagtagttgatccactccttccacaagagcccgtaaatcttcctcgtttgctccgattccagtcggcagtgatatatccattactgcatgggaggacccggatgttgactcctccttgctgggcttgtagctggcacatgctattatgcgcttgaatccagagtcactgagcctgaagtggctggatgcttcaatatcttgggtatcaattttcaagtaaaagctgcaaaattcctcagagacactaattttgtgaaccacagtttttacatatactgtggccaagccactgctgtagcctgtgctgacaacaaggtcatcattgagagatacctccactggcctccccaggaaatgcttctctgtcaccttatacttgtggaagtcaccttcgtgtttgtaggcgacattgatgtccatatccaaatgaatttgttttaacaggagtgaatattctgtcaggccctcgatggcattaatcgtatcctgggtggaataaaagccgcctccatacctctgctcttcagatagccacttgatgatggggttggcgtaattcatatccttcagtttcaggctggcgagcaaagcataggctgtggtttcaaccatacctgctgtgccgctgctgggcacagagctgtctggacgtttgagggtatctctccagtaacggtaaatgggcggatcacctttaacaaaagcttccttcctcagggccgacacaattagacgaaacctcgggtgggttctgtctcctagggaaagagcataggctacaatggccagtgtgaaggtgctcttggatggcagggtgttttcaagcaggaaggagtcggctttatctagcgctgtgtggattttcatggtggggcatatgtcaactgcctttctaattccaatcacagaaaaggctgtaagatacaaagttttctcttgggcttcagcaggcaaagtaccctgtaattttattggtagatattgggaattttccttgaaagagccgttttccagctgacacttctcaaccagccatagcaaagagttacaaattgagttttcatcctgttttacatacttggccacctgtccaagcactctcagagcaaaagctgtcagccaggtactagcgctcgcccccttccacatgctgtaggaatagtcagcgtttctgtaggacatgacgctcaccaccccttgttttatttttttctccaggctctgtcttttactcagtgtatcaggatagaaaatattccaatggtttcctgcttccaggtagtggaaaacatagaacaccggagctatgctcatgagctctgcctctgcactgcccttggggaggtgggttaggatgttgatgccttccttactcagaaccgtggacaagaactcccctacaagcagtcctttgacactcaaaatcctttcaactttggtcttggggaccaaatctaatgggatcctgtatgggaattcctttcgtctgttaacaataccacgaattcccttagggtccagaatcacgccggcatagctttccctcttgactccttctggcactacccgtaatgtctttactaagatgtctttcccaaatgaggtctctagtgagaagtttatggagtgaaggccaatttccagaggaagcagggtgaaggtcaccaagtgactggacgagccctctatcctctggaacacacatctggagggcctggaggtgtgaaggctagcagctgagcttcctgaagtgcagatcccctccacagcagacattttaacacagaactttgtccctgaggtcatatagttgtaaacagttcctttcaattggatctgttctcctcgcacaacagaatatggtatgttcatctccaggaagacttctttgaacacctttgccttgagtgtatcagcaacacatataccattgtctgaaatgccaatgccttgaatttcccaagtcgttagtgagtcaggcagcgtgacctgcagctgttttcttttgggaacgcgatgaatttcccatagccagctctctggaaagtagcttcggatatctgccttcatcactggtaacagggtcttaatgtggatccttcccagttggacaggtttatgggggctttcttttcggatcttgttcgcaatagtacagcactcgttgaaggccctgatgcagagagggcctatggtaacccgggccactcgctcctcacaggtttcgtagaagttcactcgggctccgtcatagcagcatttctttggcacactatgtttgtacttagcagcttgttcttctattttctgccttaggagatgcaggtttctctttgacctgagaatttctttacaagagtcatcacgataatgggagtcatctgcgtttgcgttggtgaggaaggtgagcccagctagatggaatacatctgcattgtcatggccaccacctgccccacagcccaggtcactcttttcatccaaagcttgaaagactctttgcatggcccttttggcgtttccctggactttatacacagctctgtccactgctgatagtgctacccatgagtctgcttcagtcaccatgtcaagggacacagtttggcctggagaatacacatattcatctggagacagatggacctggagctggttgccacacttctcctcaatatttatccagactgcgtcagccactaattctgctgtttgctcccctgtgactatgtaatagaccaggagtcgtgctgaaggaaccatgttctgtgtcactggaatatttatattttgataagttgaggagaaaagtttctctcttgtgccgtactgtacaattttgcctttggataaaatcaagtaattatagtgagttattttgtcgatatatgggctcttgggggtaaccataatattcaggtattctcccacaagcatgggcttgtagttttcagtccaagcgatgtaaatgtaactttggctgagagacgagtacgcaactgcttcgtactctttgctggcttgattttcttcgggaagttctgggtcatcagttctgatctcaaactttagcaccgtcacatttgatgggaggttcagcacaaacacagctactccatcagtgtcatgagtgatgctcctctttgtttccaagtcagatgtctcttgattcacatcgactgtttgtgccatcagagttactgggacccctcctaccgcctgctcgagtgaatctttaacctgtgccttgatggaaaatggaatcccgggcttcacgaaaagaggagtagcgaccaaattcagtgtgtagggagagaggacatatttgactccagggatttctgcctcttctgaaaatccacctgaagattctgtgactgttactgcaatataaaggtacttgttgtttaagtcttctagactgttgtaggacagctctttaactgctgtttcagaatcaaaagagatctgagcaactccgtcaaccaactttgcggcttgtgtggctttgtgcatcatctgcttctcctcatcttttatgtcctctctcaatccaaaaaaggcatacacttcagcatcaggtaccactttattataaaaatatcttgctttcacagtgatttcaaagttcttaaagtttttatagccaatgaaggttctttctagttctattgaaacagagaatcgtggcaagacatattctttaatttcaaagtatgcagttccagttgttgtaaaatccttcttatagttagctttaattgtccaaacaccatacttgggattagatggaatcttgaagtcaggaaaagagataattccggtgtaatcattttcttctacaatgtcaacttctgatccttcggggtctatgaaagttaagacagtctcccgtttggctggcttcaagtcgtcacccagagaatagactctgatctttactgactggtccggcgtgtaaacaggtttgtctgtatggatgaagagaattccattgttataggtaattggtattttctttgattttgaaaagtgttttgacacaacttccagatacacgtgagagactgggctttcttctctaggaacttgattgggctgtagtgtcaacagtgccgcgttttggaatttgttttccggggacaaattaacatagcctgaagagaaggtgacttttttgtcaggatagctttttagagaaagagttgcatcaaatgcttcagtgtagccatggacttgaattaccacattttcagacgagccgacccggaggattttgggtgctgaaatgacgtaggtttgttcctgtccccaagttttgtccaggaaaattaaaagacaaagtattccccaaagacccatggctggtagcggcataaacccatgggcatggcctccctgtaaccactttccttttaaa

SEQ ID NO: 8 - DNA, 4497 bp, Rattus norvegicus
  source 1..4497: mol_type = genomic DNA
tacagttgagtgcaaagtcaagcttttatggcattttctgtccttggtattttttttttcaagcaagaccatgttttcctaaggggctacaatttcagtgagtctcttcttccggccccaacaaacacccctggctgctaacgttacagacttgttccagcttattggtgctgatgtccaatagccttgggggacctgccttcggctctccacaaggctattttgtttcacaaagtaactcttcaacttacgctttactataaagaaaatgtatccgattctaggctaagtttccaagcgatcctggctcctaggagccaccaacaggagtacccgggaaggccacgcagcagaacttcctcaggcattttcacagccatttagaaagatgtcttcagcgaactcgtccaaattagctacaaacgcttggcaggatggacacgttgtgtctgtgggccaatattcaatccaggtggaggaatctagagggtatatatacttgaaactgaaattgtgtttgatctgcagagcctctttgcccatgattaaatattgctttcctttcaccaggttggcgttggtacagcttatctttttaatgaaggtgatctcagagtccttctcagcagcggcttcccctgttttgtaaatatccagaagcgtcgcagtgtacttgacaaaaatgttttcttccgtggccgacgtgatcctgaccttataagcatatgcaatctctggtttacatgctgtttctttcctggtgtctgcagagatggccaggtccagttctgcctgcagttgcccacaatcagcttcaacgcatttgcatgccgctccttcacagactctctgaaggttggtgtcagaagtgctgtaaatcatggtacactgcttatctggtctgtgatactcgtacaccgtgaacgtagcaggattcagaaacccaacttggaaaagttcaaatatccggaaccgaacacaaaggaaatctctggagggaatcgaattcaattgcagaataacatgactgtctttgatctggtaatcagttaggagttgatctactccttccacaagagctcgtaaatcttcttggtttgctccgattccggtcggcagcagtatatccattactgcatgggaggacccagatgctgactcctccttgctgggcttgtagctggcacaggctattatgcgcttgtgtcccgagtcactgtagctgaggtagctggaggcttcaacttcttgggtatcaattttcaagtaaaagctgcaaaattcctcagcgacactagttttgtgaaccacagtttttacatatactgtagccaagccactgctatagcctgtggtgacgatgaggtcatcattgaggggtacctccactggcctcccgaggaagttcttctctgtcactttatactggtagaaatcccctttgtgtttgtaggagacattgatatccatatccaaatgaagttgtttaaccaggagtgaatactctgtcaggccctcgatggcgttaatggtatcctgggtggaataaaagccgcctccatacctctgctcctcagatagccacttgatgatcgggttgacataactcgtctccttcaggttcaggctggtgagcaaagcataggccgtggtttctaccatacctgctgtgccgctgttgggtgctgagctgtctggacgttggagagtgtctctccagaaacggtaaatgggcgggtctcctttaaccaaagcttccctcttcagggctgacacaatagaacgaaacttcgggtgggttctgtctcccagggagagagcataggccacaatggccagggtgaaggtgctcttggaaggcagggtcctttcaagtaggaaggagtcagctttagccagcgctgtgtagattttctccgtggggcatatgccaatagcctttctaattccaatcacagaaaaggctgtaagatataaagtgttctcttgggcttcagcaggcaaagtaccctgtaattttattggtagatattgggaattttccttgaaagatccgttttccagctgacacttctcaatcagccataacaaggagttacagatcgagtattggtcttgtttcacatacttgttcacctgtccaagcactctcagagcaaaagctgtcagccaggcactagagcttgctcccttccacatgctgtaggaatagtcagcgtttctgtaggacatgacgctcaccagcccttcttttatttttttctgcaggctctgttttctagctaacgtatcagggtggaaaatattccaatggtttcctgcttccaggtagtggaaaacgtagaacaccgggactatgctcatgagttctgcctcggcgctgcccttggggaggtgggttaggatgtcgatgccttctttactcagaaccgtggacaagaattcccctataagcagtccttttacactcaaaatccttttgacgttggttttggggaccaaatctaatggtatcctgtatgggaattcctttcgtctgttaacaataccataaactcccctggggtccagagtcacaccagcatagctttcccttttgatcccttctggcactacccgtaatgtcttcactaagatttctttcccaaatgaagtctctagtgagaagtttatggagtgaaggccaatttccagaggaagcaggctgaaggtcaccaagtgactggaggagccctctattctctggcgcacacatctggaggacctagaggtctgagggctagcagccgagcttcctggagtgcagattccctccacggcagacattttaacacagaacattgtcccagaggtcctataattgtaaacggttcccttcaattggatctgctcccctcgtacaacagaatatggtatgttcatctccaggaagacatctttgaacacctttgccttgagtgtgtcagcaacacatataccattgtctgagatgccgatgccttgaatttcccaggtcgtcagtgagtcaggcagtgcaacctgcagctggtttcttttgggaacacgatgaacttcccatagccagctctctggaaagtagcttcggatttctgccttcatcactggtaacagggcctttatttggatccttcccaacagcatgcctttgtggtggctttcttttcggatcttatccgcaatagtacaacactcgttgaaggccctgatgcagtgtgggcctatggtcacccgggcaactcgctgctcacaggtttcgtatttgttttctcgggctccatcataacagcatttcttgggcacacggtgtttgtatttagcagcttgttcttccactttctgatgcaggagctgcaggtctctctttggcctgagaatttccttacaagagtcatcgtggtattgggagtcatctgcgtttgcattggtgaggaaggtgagcccagctagatggaatacatctacattgtcacggccaccacctgccccacagcccaggtcactcttgtcatcaaaagcttggaacactctttgcatggcccttttggcttttccccggactccatacacagcgctgtccaccgcagatagtgccacccatgagtctgcttcagtcaccatgtcaagggacacagtttggcctggagaatacacgtctttatctggagacagatggacctggagctggttgccacacttctcctcaatgtttatccagactgcgtcagccaccaattctgctgtctgctcccccgtgactatgtaatagaccaggagccgcgctgaaggaaccatgtcctgtgtcactgggatgtttatattttgataagatgaatagagaagtttctcctttgtgccatactgtacaattttgcctttggataaaatcaagtaattatagtgagttattttgtcaatatatggactcttgggggtgacgataatattcagatattctcccacaagcatgggcttgtagttttcagtccagccaatgtaaatgtaactctggctgagggatgagtatgtaactgcttcatattctttgctggcttgattttcttcgggaagttccggggcatcagttttgacctcaaacttcagtgatgtcacttctgatgggaggttcaccacaaatgaagccactccatcagcagagtgtgtgatgctcctctttggttccaagtcagatgtctcttgattcacattgactgtttgtgccatcagagttactgggacccctcctaccaactgctcgagtgaatccttaacctgtaccttgatggaaaatggaatcccaggcttcaggaaaagaggggtagcgaccaaattcagtgtatagggagagaggacgtatttgatgccaggaatttctgcctcttccgaaaacccacctacaagggcagcaagcactgagttaatgtttccggaaagatgatggcgggctgtaggacatctgtcggtctctgtgctatccat

SEQ ID NO: 9 - protein, 16 aa, unidentified
  REGION 1..16: note = source = /note="Description of Unknown: RFGF peptide"
AAVALLPAVLLALLAP

SEQ ID NO: 10 - protein, 11 aa, unidentified
  REGION 1..11: note = source = /note="Description of Unknown: RFGF analogue peptide"
AALLPVLLAAP

SEQ ID NO: 11 - protein, 13 aa, Human immunodeficiency virus
GRKKRRQRRRPPQ

SEQ ID NO: 12 - protein, 16 aa, Drosophila sp.
RQIKIWFQNRRMKWKK

SEQ ID NO: 13 - DNA, 21 bp, synthetic construct
  source 1..21: mol_type = other DNA
  modified_base 1: mod_base = OTHER; note = 2'-O-methylcytidine-3'-phosphate
  modified_base 2: mod_base = OTHER; note = 2'-O-methyluridine-3'-phosphate
  modified_base 3: mod_base = OTHER; note = 2'-O-methyluridine-3'-phosphate
  modified_base 4: mod_base = OTHER; note = adenosine-3'-phosphate
  modified_base 5: mod_base = OTHER; note = 2'-O-methylcytidine-3'-phosphate
  modified_base 6: mod_base = OTHER; note = guanosine-3'-phosphate
  modified_base 7: mod_base = OTHER; note = 2'-O-methylcytidine-3'-phosphate
  modified_base 8: mod_base = OTHER; note = 2'-O-methyluridine-3'-phosphate
  modified_base 9: mod_base = OTHER; note = guanosine-3'-phosphate
  modified_base 10: mod_base = OTHER; note = adenosine-3'-phosphate
  modified_base 11: mod_base = OTHER; note = guanosine-3'-phosphate
  modified_base 12: mod_base = OTHER; note = 2'-O-methyluridine-3'-phosphate
  modified_base 13: mod_base = OTHER; note = adenosine-3'-phosphate
  modified_base 14: mod_base = OTHER; note = 2'-O-methylcytidine-3'-phosphate
  modified_base 15: mod_base = OTHER; note = 2'-O-methyluridine-3'-phosphate
  modified_base 16: mod_base = OTHER; note = 2'-O-methyluridine-3'-phosphate
  modified_base 17: mod_base = OTHER; note = 2'-O-methylcytidine-3'-phosphate
  modified_base 18: mod_base = OTHER; note = guanosine-3'-phosphate
  modified_base 19: mod_base = OTHER; note = adenosine-3'-phosphate
  modified_base 20: mod_base = OTHER; note = 2'-deoxythymidine-3'-phosphorothioate
  misc_feature 1..19: note = RNA
  misc_feature 20..21: note = DNA
cttacgctgagtacttcgatt

SEQ ID NO: 14 - DNA, 21 bp, synthetic construct
  source 1..21: mol_type = other DNA
  modified_base 1: mod_base = OTHER; note = uridine-3'-phosphate
  modified_base 2: mod_base = OTHER; note = cytidine-3'-phosphate
  modified_base 3: mod_base = OTHER; note = guanosine-3'-phosphate
  modified_base 4: mod_base = OTHER; note = adenosine-3'-phosphate
  modified_base 5: mod_base = OTHER; note = adenosine-3'-phosphate
  modified_base 6: mod_base = OTHER; note = guanosine-3'-phosphate
  modified_base 7: mod_base = OTHER; note = 2'-O-methyluridine-3'-phosphate
  modified_base 8: mod_base = OTHER; note = adenosine-3'-phosphate
  modified_base 9: mod_base = OTHER; note = cytidine-3'-phosphate
  modified_base 10: mod_base = OTHER; note = uridine-3'-phosphate
  modified_base 11: mod_base = OTHER; note = 2'-O-methylcytidine-3'-phosphate
  modified_base 12: mod_base = OTHER; note = adenosine-3'-phosphate
  modified_base 13: mod_base = OTHER; note = guanosine-3'-phosphate
  modified_base 14: mod_base = OTHER; note = cytidine-3'-phosphate
  modified_base 15: mod_base = OTHER; note = guanosine-3'-phosphate
  modified_base 16: mod_base = OTHER; note = 2'-O-methyluridine-3'-phosphate
  modified_base 17: mod_base = OTHER; note = adenosine-3'-phosphate
  modified_base 18: mod_base = OTHER; note = adenosine-3'-phosphate
  modified_base 19: mod_base = OTHER; note = guanosine-3'-phosphate
  modified_base 20: mod_base = OTHER; note = 2'-deoxythymidine-3'-phosphorothioate
  misc_feature 1..19: note = RNA
  misc_feature 20..21: note = DNA
tcgaagtactcagcgtaagtt

SEQ ID NO: 15 - RNA, 21 nt, synthetic construct
  source 1..21: mol_type = other RNA
aataactcactataattactt

SEQ ID NO: 16 - RNA, 21 nt, synthetic construct
  source 1..21: mol_type = other RNA
tgacaaaataactcactataa

SEQ ID NO: 17 - RNA, 21 nt, synthetic construct
  source 1..21: mol_type = other RNA
cttcctctggaaattggcctt

SEQ ID NO: 18 - RNA, 21 nt, synthetic construct
  source 1..21: mol_type = other RNA
gacaaaataactcactataat

SEQ ID NO: 19 - RNA, 21 nt, synthetic construct
  source 1..21: mol_type = other RNA
tcctctggaaattggccttca

SEQ ID NO: 20 - RNA, 21 nt, synthetic construct
  source 1..21: mol_type = other RNA
aagcaagatatttttataata

SEQ ID NO: 21 - RNA, 21 nt, synthetic construct
  source 1..21: mol_type = other RNA
aaaatgtttttgtcaagtaca

SEQ ID NO: 22 - RNA, 21 nt, synthetic construct
  source 1..21: mol_type = other RNA
atttaaacaacaagtaccttt

SEQ ID NO: 23 - RNA, 21 nt, synthetic construct
  source 1..21: mol_type = other RNA
attcagaaagtctgtgaagga

SEQ ID NO: 24 - RNA, 21 nt, synthetic construct
  source 1..21: mol_type = other RNA
acactgaagcatttgatgcaa

SEQ ID NO: 25 - RNA, 21 nt, synthetic construct
  source 1..21: mol_type = other RNA
gcagttctgtgttaaaatgtc

SEQ ID NO: 26 - RNA, 21 nt, synthetic construct
  source 1..21: mol_type = other RNA
aggattttgagtgtaaaagga

SEQ ID NO: 27 - RNA, 21 nt, synthetic construct
  source 1..21: mol_type = other RNA
aatgatgaaccttgtaaagaa

SEQ ID NO: 28 - RNA, 21 nt, synthetic construct
  source 1..21: mol_type = other RNA
atcattggaacatttttcatt

SEQ ID NO: 29 - RNA, 21 nt, synthetic construct
  source 1..21: mol_type = other RNA
agccagaaattcggagttatt

SEQ ID NO: 30 - RNA, 21 nt, synthetic construct
  source 1..21: mol_type = other RNA
tccctgggagataaaactcac

SEQ ID NO: 31 - RNA, 21 nt, synthetic construct
  source 1..21: mol_type = other RNA
gaaaatgatgaaccttgtaaa

SEQ ID NO: 32 - RNA, 21 nt, synthetic construct
  source 1..21: mol_type = other RNA
attgctcaagtcacatttgat

SEQ ID NO: 33 - RNA, 21 nt, synthetic construct
  source 1..21: mol_type = other RNA
gagattgcatatgcttataaa

SEQ ID NO: 34 - RNA, 21 nt, synthetic construct
  source 1..21: mol_type = other RNA
gttatcctgataaaaaattta

SEQ ID NO: 35 - RNA, 21 nt, synthetic construct
  source 1..21: mol_type = other RNA
aggaagtttgcagcttttatt

SEQ ID NO: 36 - RNA, 21 nt, synthetic construct
  source 1..21: mol_type = other RNA
gaagaaattgatcatattgga

SEQ ID NO: 37 - RNA, 21 nt, synthetic construct
  source 1..21: mol_type = other RNA
atcctgataaaaaatttagtt

SEQ ID NO: 38 - RNA, 21 nt, synthetic construct
  source 1..21: mol_type = other RNA
tggaaaagaaatcttagtaaa

SEQ ID NO: 39 - RNA, 21 nt, synthetic construct
  source 1..21: mol_type = other RNA
tcttatcaaagtataaacatt

SEQ ID NO: 40 - RNA, 21 nt, synthetic construct
  source 1..21: mol_type = other RNA
tccctacaaactgaatttggt

SEQ ID NO: 41 - RNA, 21 nt, synthetic construct
  source 1..21: mol_type = other RNA
caggagcaaacatatgtcatt

SEQ ID NO: 42 - RNA, 21 nt, synthetic construct
  source 1..21: mol_type = other RNA
acatgtaacaactgtagttca

SEQ ID NO: 43 - RNA, 21 nt, synthetic construct
  source 1..21: mol_type = other RNA
caggaaatcattggaacattt

SEQ ID NO: 44 - RNA, 21 nt, synthetic construct
  source 1..21: mol_type = other RNA
tttaagaattttgaaattact

SEQ ID NO: 45 - RNA, 21 nt, synthetic construct
  source 1..21: mol_type = other RNA
tattctgcaactgaattcgat

SEQ ID NO: 46 - RNA, 21 nt, synthetic construct
  source 1..21: mol_type = other RNA
gcccttggaaagagtatttca

SEQ ID NO: 47 - RNA, 21 nt, synthetic construct
  source 1..21: mol_type = other RNA
cctgataaaaaatttagttac

SEQ ID NO: 48 - RNA, 21 nt, synthetic construct
  source 1..21: mol_type = other RNA
cccttggaaagagtatttcaa

SEQ ID NO: 49 - RNA, 21 nt, synthetic construct
  source 1..21: mol_type = other RNA
tgcagatcaaacacaatttca

SEQ ID NO: 50 - RNA, 21 nt, synthetic construct
  source 1..21: mol_type = other RNA
cagatcaaacacaatttcagt

SEQ ID NO: 51 - RNA, 21 nt, synthetic construct
  source 1..21: mol_type = other RNA
gttccggatatttgaactttt

SEQ ID NO: 52 - RNA, 21 nt, synthetic construct
  source 1..21: mol_type = other RNA
atttaaacaacaagtaccttt

SEQ ID NO: 53 - RNA, 21 nt, synthetic construct
  source 1..21: mol_type = other RNA
atttaaacaacaagtaccttt

SEQ ID NO: 54 - RNA, 21 nt, synthetic construct
  source 1..21: mol_type = other RNA
tgacaaaataactcactataa

SEQ ID NO: 55 - RNA, 21 nt, synthetic construct
  source 1..21: mol_type = other RNA
tgacaaaataactcactataa

SEQ ID NO: 56 - RNA, 21 nt, synthetic construct
  source 1..21: mol_type = other RNA
gacaaaataactcactataat

SEQ ID NO: 57 - RNA, 21 nt, synthetic construct
  source 1..21: mol_type = other RNA
gacaaaataactcactataat

SEQ ID NO: 58 - RNA, 21 nt, synthetic construct
  source 1..21: mol_type = other RNA
gttccggatatttgaactttt

SEQ ID NO: 59 - RNA, 21 nt, synthetic construct
  source 1..21: mol_type = other RNA
gttccggatatttgaactttt

SEQ ID NO: 60 - RNA, 21 nt, synthetic construct
  source 1..21: mol_type = other RNA
tgcagatcaaacacaatttca

SEQ ID NO: 61 - RNA, 21 nt, synthetic construct
  source 1..21: mol_type = other RNA
tgcagatcaaacacaatttca

SEQ ID NO: 62 - RNA, 21 nt, synthetic construct
  source 1..21: mol_type = other RNA
aagcaagatatttttataata

SEQ ID NO: 63 - RNA, 21 nt, synthetic construct
  source 1..21: mol_type = other RNA
aagcaagatatttttataata

SEQ ID NO: 64 - RNA, 21 nt, synthetic construct
  source 1..21: mol_type = other RNA
cagatcaaacacaatttcagt

SEQ ID NO: 65 - RNA, 21 nt, synthetic construct
  source 1..21: mol_type = other RNA
cagatcaaacacaatttcagt

SEQ ID NO: 66 - RNA, 23 nt, synthetic construct
  source 1..23: mol_type = other RNA
aagtaattatagtgagttatttt

SEQ ID NO: 67 - RNA, 23 nt, synthetic construct
  source 1..23: mol_type = other RNA
ttatagtgagttattttgtcaat

SEQ ID NO: 68 - RNA, 23 nt, synthetic construct
  source 1..23: mol_type = other RNA
aaggccaatttccagaggaagca

SEQ ID NO: 69 - RNA, 23 nt, synthetic construct
  source 1..23: mol_type = other RNA
attatagtgagttattttgtcaa

SEQ ID NO: 70 - RNA, 23 nt, synthetic construct
  source 1..23: mol_type = other RNA
tgaaggccaatttccagaggaag

SEQ ID NO: 71 - RNA, 23 nt, synthetic construct
  source 1..23: mol_type = other RNA
tattataaaaatatcttgctttt

SEQ ID NO: 72 - RNA, 23 nt, synthetic construct
  source 1..23: mol_type = other RNA
tgtacttgacaaaaacattttct

SEQ ID NO: 73 - RNA, 23 nt, synthetic construct
  source 1..23: mol_type = other RNA
aaaggtacttgttgtttaaatct

SEQ ID NO: 74 - RNA, 23 nt, synthetic construct
  source 1..23: mol_type = other RNA
tccttcacagactttctgaattt

SEQ ID NO: 75 - RNA, 23 nt, synthetic construct
  source 1..23: mol_type = other RNA
ttgcatcaaatgcttcagtgtat

SEQ ID NO: 76 - RNA, 23 nt, synthetic construct
  source 1..23: mol_type = other RNA
gacattttaacacagaactgcat

SEQ ID NO: 77 - RNA, 23 nt, synthetic construct
  source 1..23: mol_type = other RNA
tccttttacactcaaaatccttt

SEQ ID NO: 78 - RNA, 23 nt, synthetic construct
  source 1..23: mol_type = other RNA
ttctttacaaggttcatcatttt

SEQ ID NO: 79 - RNA, 23 nt, synthetic construct
  source 1..23: mol_type = other RNA
aatgaaaaatgttccaatgattt

SEQ ID NO: 80 - RNA, 23 nt, synthetic construct
  source 1..23: mol_type = other RNA
aataactccgaatttctggcttg

SEQ ID NO: 81 - RNA, 23 nt, synthetic construct
  source 1..23: mol_type = other RNA
gtgagttttatctcccagggaaa

SEQ ID NO: 82 - RNA, 23 nt, synthetic construct
  source 1..23: mol_type = other RNA
tttacaaggttcatcattttctt

SEQ ID NO: 83 - RNA, 23 nt, synthetic construct
  source 1..23: mol_type = other RNA
atcaaatgtgacttgagcaattc

SEQ ID NO: 84 - RNA, 23 nt, synthetic construct
  source 1..23: mol_type = other RNA
tttataagcatatgcaatctctg

SEQ ID NO: 85 - RNA, 23 nt, synthetic construct
  source 1..23: mol_type = other RNA
taaattttttatcaggataactt

SEQ ID NO: 86 - RNA, 23 nt, synthetic construct
  source 1..23: mol_type = other RNA
aataaaagctgcaaacttcctca

SEQ ID NO: 87 - RNA, 23 nt, synthetic construct
  source 1..23: mol_type = other RNA
tccaatatgatcaatttcttcta

SEQ ID NO: 88 - RNA, 23 nt, synthetic construct
  source 1..23: mol_type = other RNA
aactaaattttttatcaggataa

SEQ ID NO: 89 - RNA, 23 nt, synthetic construct
  source 1..23: mol_type = other RNA
tttactaagatttcttttccaaa

SEQ ID NO: 90 - RNA, 23 nt, synthetic construct
  source 1..23: mol_type = other RNA
aatgtttatactttgataagatg

SEQ ID NO: 91 - RNA, 23 nt, synthetic construct
  source 1..23: mol_type = other RNA
accaaattcagtttgtagggaga

SEQ ID NO: 92 - RNA, 23 nt, synthetic construct
  source 1..23: mol_type = other RNA
aatgacatatgtttgctcctgtc

SEQ ID NO: 93 - RNA, 23 nt, synthetic construct
  source 1..23: mol_type = other RNA
tgaactacagttgttacatgtac

SEQ ID NO: 94 - RNA, 23 nt, synthetic construct
  source 1..23: mol_type = other RNA
aaatgttccaatgatttcctgtt

SEQ ID NO: 95 - RNA, 23 nt, synthetic construct
  source 1..23: mol_type = other RNA
agtaatttcaaaattcttaaagt

SEQ ID NO: 96 - RNA, 23 nt, synthetic construct
  source 1..23: mol_type = other RNA
atcgaattcagttgcagaataac

SEQ ID NO: 97 - RNA, 23 nt, synthetic construct
  source 1..23: mol_type = other RNA
tgaaatactctttccaagggctt

SEQ ID NO: 98 - RNA, 23 nt, synthetic construct
  source 1..23: mol_type = other RNA
gtaactaaattttttatcaggat

SEQ ID NO: 99 - RNA, 23 nt, synthetic construct
  source 1..23: mol_type = other RNA
ttgaaatactctttccaagggct

SEQ ID NO: 100 - RNA, 23 nt, synthetic construct
  source 1..23: mol_type = other RNA
tgaaattgtgtttgatctgcaga

SEQ ID NO: 101 - RNA, 23 nt, synthetic construct
  source 1..23: mol_type = other RNA
actgaaattgtgtttgatctgca

SEQ ID NO: 102 - RNA, 23 nt, synthetic construct
  source 1..23: mol_type = other RNA
aaaagttcaaatatccggaaccg

SEQ ID NO: 103 - RNA, 23 nt, synthetic construct
  source 1..23: mol_type = other RNA
aaaggtacttgttgtttaaatct

SEQ ID NO: 104 - RNA, 23 nt, synthetic construct
  source 1..23: mol_type = other RNA
aaaggtacttgttgtttaaatct

SEQ ID NO: 105 - RNA, 23 nt, synthetic construct
  source 1..23: mol_type = other RNA
ttatagtgagttattttgtcaat

SEQ ID NO: 106 - RNA, 23 nt, synthetic construct
  source 1..23: mol_type = other RNA
ttatagtgagttattttgtcaat

SEQ ID NO: 107 - RNA, 23 nt, synthetic construct
  source 1..23: mol_type = other RNA
attatagtgagttattttgtcaa

SEQ ID NO: 108 - RNA, 23 nt, synthetic construct
  source 1..23: mol_type = other RNA
attatagtgagttattttgtcaa

SEQ ID NO: 109 - RNA, 23 nt, synthetic construct
  source 1..23: mol_type = other RNA
aaaagttcaaatatccggaaccg

SEQ ID NO: 110 - RNA, 23 nt, synthetic construct
  source 1..23: mol_type = other RNA
aaaagttcaaatatccggaaccg

SEQ ID NO: 111 - RNA, 23 nt, synthetic construct
  source 1..23: mol_type = other RNA
tgaaattgtgtttgatctgcaga

SEQ ID NO: 112 - RNA, 23 nt, synthetic construct
  source 1..23: mol_type = other RNA
tgaaattgtgtttgatctgcaga

SEQ ID NO: 113 - RNA, 23 nt, synthetic construct
  source 1..23: mol_type = other RNA
tattataaaaatatcttgctttt

SEQ ID NO: 114 - RNA, 23 nt, synthetic construct
  source 1..23: mol_type = other RNA
tattataaaaatatcttgctttt

SEQ ID NO: 115 - RNA, 23 nt, synthetic construct
  source 1..23: mol_type = other RNA
actgaaattgtgtttgatctgca

SEQ ID NO: 116 - RNA, 23 nt, synthetic construct
  source 1..23: mol_type = other RNA
actgaaattgtgtttgatctgca

SEQ ID NO: 117 - RNA, 21 nt, synthetic construct
  source 1..21: mol_type = other RNA
  modified_base 1: mod_base = OTHER; note = 2'-deoxy-2'-fluoroadenosine-3'-phosphate
  modified_base 2: mod_base = OTHER; note = 2'-O-methyladenosine-3'-phosphate
  modified_base 3: mod_base = OTHER; note = 2'-deoxy-2'-fluorouridine-3'-phosphate
  modified_base 4: mod_base = OTHER; note = 2'-O-methyladenosine-3'-phosphate
  modified_base 5: mod_base = OTHER; note = 2'-deoxy-2'-fluoroadenosine-3'-phosphate
  modified_base 6: mod_base = OTHER; note = 2'-O-methylcytidine-3'-phosphate
  modified_base 7: mod_base = OTHER; note = 2'-deoxy-2'-fluorouridine-3'-phosphate
  modified_base 8: mod_base = OTHER; note = 2'-O-methylcytidine-3'-phosphate
  modified_base 9: mod_base = OTHER; note = 2'-deoxy-2'-fluoroadenosine-3'-phosphate
  modified_base 10: mod_base = OTHER; note = 2'-deoxy-2'-fluorocytidine-3'-phosphate
  modified_base 11: mod_base = OTHER; note = 2'-deoxy-2'-fluorouridine-3'-phosphate
  modified_base 12: mod_base = OTHER; note = 2'-O-methyladenosine-3'-phosphate
  modified_base 13: mod_base = OTHER; note = 2'-deoxy-2'-fluorouridine-3'-phosphate
  modified_base 14: mod_base = OTHER; note = 2'-O-methyladenosine-3'-phosphate
  modified_base 15: mod_base = OTHER; note = 2'-deoxy-2'-fluoroadenosine-3'-phosphate
  modified_base 16: mod_base = OTHER; note = 2'-O-methyluridine-3'-phosphate
  modified_base 17: mod_base = OTHER; note = 2'-deoxy-2'-fluorouridine-3'-phosphate
  modified_base 18: mod_base = OTHER; note = 2'-O-methyladenosine-3'-phosphate
  modified_base 19: mod_base = OTHER; note = 2'-deoxy-2'-fluorocytidine-3'-phosphate
  modified_base 20: mod_base = OTHER; note = 2'-O-methyluridine-3'-phosphate
  modified_base 21: mod_base = OTHER; note = 2'-deoxy-2'-fluorouridine-3'-phosphate ((2S,4R)-1-[29-[[2-(acetylamino)-2-deoxy-beta-D-galactopyra nosyl]oxy]-14,14-bis[[3-[[3-[[5-[[2-(acetylamino)-2-deoxy-b eta-D-galactopyranosyl]oxy]-1-oxopentyl]amino]propyl]amino] -3-oxopropoxy]methyl]-1,12,19,25-tetraoxo-16-oxa-13,20,24-t riazanonacos-1-yl]-4-hydroxy-2-pyrrolidinyl)methyl ester
aataactcactataattactt

SEQ ID NO: 118 - RNA, 21 nt, synthetic construct
  source 1..21: mol_type = other RNA
  modified_base 1: mod_base = OTHER; note = 2'-deoxy-2'-fluorouridine-3'-phosphate
  modified_base 2: mod_base = OTHER; note = 2'-O-methylguanosine-3'-phosphate
  modified_base 3: mod_base = OTHER; note = 2'-deoxy-2'-fluoroadenosine-3'-phosphate
  modified_base 4: mod_base = OTHER; note = 2'-O-methylcytidine-3'-phosphate
  modified_base 5: mod_base = OTHER; note = 2'-deoxy-2'-fluoroadenosine-3'-phosphate
  modified_base 6: mod_base = OTHER; note = 2'-O-methyladenosine-3'-phosphate
  modified_base 7: mod_base = OTHER; note = 2'-deoxy-2'-fluoroadenosine-3'-phosphate
  modified_base 8: mod_base = OTHER; note = 2'-O-methyladenosine-3'-phosphate
  modified_base 9: mod_base = OTHER; note = 2'-deoxy-2'-fluorouridine-3'-phosphate
  modified_base 10: mod_base = OTHER; note = 2'-deoxy-2'-fluoroadenosine-3'-phosphate
  modified_base 11: mod_base = OTHER; note = 2'-deoxy-2'-fluoroadenosine-3'-phosphate
  modified_base 12: mod_base = OTHER; note = 2'-O-methylcytidine-3'-phosphate
  modified_base 13: mod_base = OTHER; note = 2'-deoxy-2'-fluorouridine-3'-phosphate
  modified_base 14: mod_base = OTHER; note = 2'-O-methylcytidine-3'-phosphate
  modified_base 15: mod_base = OTHER; note = 2'-deoxy-2'-fluoroadenosine-3'-phosphate
  modified_base 16: mod_base = OTHER; note = 2'-O-methylcytidine-3'-phosphate
  modified_base 17: mod_base = OTHER; note = 2'-deoxy-2'-fluorouridine-3'-phosphate
  modified_base 18: mod_base = OTHER; note = 2'-O-methyladenosine-3'-phosphate
  modified_base 19: mod_base = OTHER; note = 2'-deoxy-2'-fluorouridine-3'-phosphate
  modified_base 20: mod_base = OTHER; note = 2'-O-methyladenosine-3'-phosphate
  modified_base 21: mod_base = OTHER; note = 2'-deoxy-2'-fluoroadenosine-3'-phosphate ((2S,4R)-1-[29-[[2-(acetylamino)-2-deoxy-beta-D-galactopyra nosyl]oxy]-14,14-bis[[3-[[3-[[5-[[2-(acetylamino)-2-deoxy-b eta-D-galactopyranosyl]oxy]-1-oxopentyl]amino]propyl]amino] -3-oxopropoxy]methyl]-1,12,19,25-tetraoxo-16-oxa-13,20,24-t riazanonacos-1-yl]-4-hydroxy-2-pyrrolidinyl)methyl ester
tgacaaaataactcactataa

SEQ ID NO: 119 - RNA, 21 nt, synthetic construct
  source 1..21: mol_type = other RNA
  modified_base 1: mod_base = OTHER; note = 2'-deoxy-2'-fluorocytidine-3'-phosphate
  modified_base 2: mod_base = OTHER; note = 2'-O-methyluridine-3'-phosphate
  modified_base 3: mod_base = OTHER; note = 2'-deoxy-2'-fluorouridine-3'-phosphate
  modified_base 4: mod_base = OTHER; note = 2'-O-methylcytidine-3'-phosphate
  modified_base 5: mod_base = OTHER; note = 2'-deoxy-2'-fluorocytidine-3'-phosphate
  modified_base 6: mod_base = OTHER; note = 2'-O-methyluridine-3'-phosphate
  modified_base 7: mod_base = OTHER; note = 2'-deoxy-2'-fluorocytidine-3'-phosphate
  modified_base 8: mod_base = OTHER; note = 2'-O-methyluridine-3'-phosphate
  modified_base 9: mod_base = OTHER; note = 2'-deoxy-2'-fluoroguanosine-3'-phosphate
  modified_base 10: mod_base = OTHER; note = 2'-deoxy-2'-fluoroguanosine-3'-phosphate
  modified_base 11: mod_base = OTHER; note = 2'-deoxy-2'-fluoroadenosine-3'-phosphate
  modified_base 12: mod_base = OTHER; note = 2'-O-methyladenosine-3'-phosphate
  modified_base 13: mod_base = OTHER; note = 2'-deoxy-2'-fluoroadenosine-3'-phosphate
  modified_base 14: mod_base = OTHER; note = 2'-O-methyluridine-3'-phosphate
  modified_base 15: mod_base = OTHER; note = 2'-deoxy-2'-fluorouridine-3'-phosphate
  modified_base 16: mod_base = OTHER; note = 2'-O-methylguanosine-3'-phosphate
  modified_base 17: mod_base = OTHER; note = 2'-deoxy-2'-fluoroguanosine-3'-phosphate
  modified_base 18: mod_base = OTHER; note = 2'-O-methylcytidine-3'-phosphate
  modified_base 19: mod_base = OTHER; note = 2'-deoxy-2'-fluorocytidine-3'-phosphate
  modified_base 20: mod_base = OTHER; note = 2'-O-methyluridine-3'-phosphate
  modified_base 21: mod_base = OTHER; note = 2'-deoxy-2'-fluorouridine-3'-phosphate ((2S,4R)-1-[29-[[2-(acetylamino)-2-deoxy-beta-D-galactopyra nosyl]oxy]-14,14-bis[[3-[[3-[[5-[[2-(acetylamino)-2-deoxy-b eta-D-galactopyranosyl]oxy]-1-oxopentyl]amino]propyl]amino] -3-oxopropoxy]methyl]-1,12,19,25-tetraoxo-16-oxa-13,20,24-t riazanonacos-1-yl]-4-hydroxy-2-pyrrolidinyl)methyl ester
cttcctctggaaattggcctt

SEQ ID NO: 120 - RNA, 21 nt, synthetic construct
  source 1..21: mol_type = other RNA
  modified_base 1: mod_base = OTHER; note = 2'-deoxy-2'-fluoroguanosine-3'-phosphate
  modified_base 2: mod_base = OTHER; note = 2'-O-methyladenosine-3'-phosphate
  modified_base 3: mod_base = OTHER; note = 2'-deoxy-2'-fluorocytidine-3'-phosphate
  modified_base 4: mod_base = OTHER; note = 2'-O-methyladenosine-3'-phosphate
  modified_base 5: mod_base = OTHER; note = 2'-deoxy-2'-fluoroadenosine-3'-phosphate
  modified_base 6: mod_base = OTHER; note = 2'-O-methyladenosine-3'-phosphate
  modified_base 7: mod_base = OTHER; note = 2'-deoxy-2'-fluoroadenosine-3'-phosphate
  modified_base 8: mod_base = OTHER; note = 2'-O-methyluridine-3'-phosphate
  modified_base 9: mod_base = OTHER; note = 2'-deoxy-2'-fluoroadenosine-3'-phosphate
  modified_base 10: mod_base = OTHER; note = 2'-deoxy-2'-fluoroadenosine-3'-phosphate
  modified_base 11: mod_base = OTHER; note = 2'-deoxy-2'-fluorocytidine-3'-phosphate
  modified_base 12: mod_base = OTHER; note = 2'-O-methyluridine-3'-phosphate
  modified_base 13: mod_base = OTHER; note = 2'-deoxy-2'-fluorocytidine-3'-phosphate
  modified_base 14: mod_base = OTHER; note = 2'-O-methyladenosine-3'-phosphate
  modified_base 15: mod_base = OTHER; note = 2'-deoxy-2'-fluorocytidine-3'-phosphate
  modified_base 16: mod_base = OTHER; note = 2'-O-methyluridine-3'-phosphate
  modified_base 17: mod_base = OTHER; note = 2'-deoxy-2'-fluoroadenosine-3'-phosphate
  modified_base 18: mod_base = OTHER; note = 2'-O-methyluridine-3'-phosphate
  modified_base 19: mod_base = OTHER; note = 2'-deoxy-2'-fluoroadenosine-3'-phosphate
  modified_base 20: mod_base = OTHER; note = 2'-O-methyladenosine-3'-phosphate
  modified_base 21: mod_base = OTHER; note = 2'-deoxy-2'-fluorouridine-3'-phosphate ((2S,4R)-1-[29-[[2-(acetylamino)-2-deoxy-beta-D-galactopyra nosyl]oxy]-14,14-bis[[3-[[3-[[5-[[2-(acetylamino)-2-deoxy-b eta-D-galactopyranosyl]oxy]-1-oxopentyl]amino]propyl]amino] -3-oxopropoxy]methyl]-1,12,19,25-tetraoxo-16-oxa-13,20,24-t riazanonacos-1-yl]-4-hydroxy-2-pyrrolidinyl)methyl ester
gacaaaataactcactataat

SEQ ID NO: 121 - RNA, 21 nt, synthetic construct
  source 1..21: mol_type = other RNA
  modified_base 1: mod_base = OTHER; note = 2'-deoxy-2'-fluorouridine-3'-phosphate
  modified_base 2: mod_base = OTHER; note = 2'-O-methylcytidine-3'-phosphate
  modified_base 3: mod_base = OTHER; note = 2'-deoxy-2'-fluorocytidine-3'-phosphate
  modified_base 4: mod_base = OTHER; note = 2'-O-methyluridine-3'-phosphate
  modified_base 5: mod_base = OTHER; note = 2'-deoxy-2'-fluorocytidine-3'-phosphate
  modified_base 6: mod_base = OTHER; note = 2'-O-methyluridine-3'-phosphate
  modified_base 7: mod_base = OTHER; note = 2'-deoxy-2'-fluoroguanosine-3'-phosphate
  modified_base 8: mod_base = OTHER; note = 2'-O-methylguanosine-3'-phosphate
  modified_base 9: mod_base = OTHER; note = 2'-deoxy-2'-fluoroadenosine-3'-phosphate
  modified_base 10: mod_base = OTHER; note = 2'-deoxy-2'-fluoroadenosine-3'-phosphate
  modified_base 11: mod_base = OTHER; note = 2'-deoxy-2'-fluoroadenosine-3'-phosphate
  modified_base 12: mod_base = OTHER; note = 2'-O-methyluridine-3'-phosphate
  modified_base 13: mod_base = OTHER; note = 2'-deoxy-2'-fluorouridine-3'-phosphate
  modified_base 14: mod_base = OTHER; note = 2'-O-methylguanosine-3'-phosphate
  modified_base 15: mod_base = OTHER; note = 2'-deoxy-2'-fluoroguanosine-3'-phosphate
  modified_base 16: mod_base = OTHER; note = 2'-O-methylcytidine-3'-phosphate
  modified_base 17: mod_base = OTHER; note = 2'-deoxy-2'-fluorocytidine-3'-phosphate
  modified_base 18: mod_base = OTHER; note = 2'-O-methyluridine-3'-phosphate
  modified_base 19: mod_base = OTHER; note = 2'-deoxy-2'-fluorouridine-3'-phosphate
  modified_base 20: mod_base = OTHER; note = 2'-O-methylcytidine-3'-phosphate
  modified_base 21: mod_base = OTHER; note = 2'-deoxy-2'-fluoroadenosine-3'-phosphate ((2S,4R)-1-[29-[[2-(acetylamino)-2-deoxy-beta-D-galactopyra nosyl]oxy]-14,14-bis[[3-[[3-[[5-[[2-(acetylamino)-2-deoxy-b eta-D-galactopyranosyl]oxy]-1-oxopentyl]amino]propyl]amino] -3-oxopropoxy]methyl]-1,12,19,25-tetraoxo-16-oxa-13,20,24-t riazanonacos-1-yl]-4-hydroxy-2-pyrrolidinyl)methyl ester
tcctctggaaattggccttca

SEQ ID NO: 122 - RNA, 21 nt, synthetic construct
  source 1..21: mol_type = other RNA
  modified_base 1: mod_base = OTHER; note = 2'-deoxy-2'-fluoroadenosine-3'-phosphate
  modified_base 2: mod_base = OTHER; note = 2'-O-methyladenosine-3'-phosphate
  modified_base 3: mod_base = OTHER; note = 2'-deoxy-2'-fluoroguanosine-3'-phosphate
  modified_base 4: mod_base = OTHER; note = 2'-O-methylcytidine-3'-phosphate
  modified_base 5: mod_base = OTHER; note = 2'-deoxy-2'-fluoroadenosine-3'-phosphate
  modified_base 6: mod_base = OTHER; note = 2'-O-methyladenosine-3'-phosphate
  modified_base 7: mod_base = OTHER; note = 2'-deoxy-2'-fluoroguanosine-3'-phosphate
  modified_base 8: mod_base = OTHER; note = 2'-O-methyladenosine-3'-phosphate
  modified_base 9: mod_base = OTHER; note = 2'-deoxy-2'-fluorouridine-3'-phosphate
  modified_base 10: mod_base = OTHER; note = 2'-deoxy-2'-fluoroadenosine-3'-phosphate
  modified_base 11: mod_base = OTHER; note = 2'-deoxy-2'-fluorouridine-3'-phosphate
  modified_base 12: mod_base = OTHER; note = 2'-O-methyluridine-3'-phosphate
  modified_base 13: mod_base = OTHER; note = 2'-deoxy-2'-fluorouridine-3'-phosphate
  modified_base 14: mod_base = OTHER; note = 2'-O-methyluridine-3'-phosphate
  modified_base 15: mod_base = OTHER; note = 2'-deoxy-2'-fluorouridine-3'-phosphate
  modified_base 16: mod_base = OTHER; note = 2'-O-methyladenosine-3'-phosphate
  modified_base 17: mod_base = OTHER; note = 2'-deoxy-2'-fluorouridine-3'-phosphate
  modified_base 18: mod_base = OTHER; note = 2'-O-methyladenosine-3'-phosphate
  modified_base 19: mod_base = OTHER; note = 2'-deoxy-2'-fluoroadenosine-3'-phosphate
  modified_base 20: mod_base = OTHER; note = 2'-O-methyluridine-3'-phosphate
  modified_base 21: mod_base = OTHER; note = 2'-deoxy-2'-fluoroadenosine-3'-phosphate ((2S,4R)-1-[29-[[2-(acetylamino)-2-deoxy-beta-D-galactopyra nosyl]oxy]-14,14-bis[[3-[[3-[[5-[[2-(acetylamino)-2-deoxy-b eta-D-galactopyranosyl]oxy]-1-oxopentyl]amino]propyl]amino] -3-oxopropoxy]methyl]-1,12,19,25-tetraoxo-16-oxa-13,20,24-t riazanonacos-1-yl]-4-hydroxy-2-pyrrolidinyl)methyl ester
aagcaagatatttttataata

SEQ ID NO: 123 - RNA, 21 nt, synthetic construct
  source 1..21: mol_type = other RNA
  modified_base 1: mod_base = OTHER; note = 2'-deoxy-2'-fluoroadenosine-3'-phosphate
  modified_base 2: mod_base = OTHER; note = 2'-O-methyladenosine-3'-phosphate
  modified_base 3: mod_base = OTHER; note = 2'-deoxy-2'-fluoroadenosine-3'-phosphate
  modified_base 4: mod_base = OTHER; note = 2'-O-methyladenosine-3'-phosphate
  modified_base 5: mod_base = OTHER; note = 2'-deoxy-2'-fluorouridine-3'-phosphate
  modified_base 6: mod_base = OTHER; note = 2'-O-methylguanosine-3'-phosphate
  modified_base 7: mod_base = OTHER; note = 2'-deoxy-2'-fluorouridine-3'-phosphate
  modified_base 8: mod_base = OTHER; note = 2'-O-methyluridine-3'-phosphate
  modified_base 9: mod_base = OTHER; note = 2'-deoxy-2'-fluorouridine-3'-phosphate
  modified_base 10: mod_base = OTHER; note = 2'-deoxy-2'-fluorouridine-3'-phosphate
  modified_base 11: mod_base = OTHER; note = 2'-deoxy-2'-fluorouridine-3'-phosphate
  modified_base 12: mod_base = OTHER; note = 2'-O-methylguanosine-3'-phosphate
  modified_base 13: mod_base = OTHER; note = 2'-deoxy-2'-fluorouridine-3'-phosphate
  modified_base 14: mod_base = OTHER; note = 2'-O-methylcytidine-3'-phosphate
  modified_base 15: mod_base = OTHER; note = 2'-deoxy-2'-fluoroadenosine-3'-phosphate
  modified_base 16: mod_base = OTHER; note = 2'-O-methyladenosine-3'-phosphate
  modified_base 17: mod_base = OTHER; note = 2'-deoxy-2'-fluoroguanosine-3'-phosphate
  modified_base 18: mod_base = OTHER; note = 2'-O-methyluridine-3'-phosphate
  modified_base 19: mod_base = OTHER; note = 2'-deoxy-2'-fluoroadenosine-3'-phosphate
  modified_base 20: mod_base = OTHER; note = 2'-O-methylcytidine-3'-phosphate
  modified_base 21: mod_base = OTHER; note = 2'-deoxy-2'-fluoroadenosine-3'-phosphate ((2S,4R)-1-[29-[[2-(acetylamino)-2-deoxy-beta-D-galactopyra nosyl]oxy]-14,14-bis[[3-[[3-[[5-[[2-(acetylamino)-2-deoxy-b eta-D-galactopyranosyl]oxy]-1-oxopentyl]amino]propyl]amino] -3-oxopropoxy]methyl]-1,12,19,25-tetraoxo-16-oxa-13,20,24-t riazanonacos-1-yl]-4-hydroxy-2-pyrrolidinyl)methyl ester
aaaatgtttttgtcaagtaca

SEQ ID NO: 124 - RNA, 21 nt, synthetic construct
  source 1..21: mol_type = other RNA
  modified_base 1: mod_base = OTHER; note = 2'-deoxy-2'-fluoroadenosine-3'-phosphate
  modified_base 2: mod_base = OTHER; note = 2'-O-methyluridine-3'-phosphate
  modified_base 3: mod_base = OTHER; note = 2'-deoxy-2'-fluorouridine-3'-phosphate
  modified_base 4: mod_base = OTHER; note = 2'-O-methyluridine-3'-phosphate
  modified_base 5: mod_base = OTHER; note = 2'-deoxy-2'-fluoroadenosine-3'-phosphate
  modified_base 6: mod_base = OTHER; note = 2'-O-methyladenosine-3'-phosphate
  modified_base 7: mod_base = OTHER; note = 2'-deoxy-2'-fluoroadenosine-3'-phosphate
  modified_base 8: mod_base = OTHER; note = 2'-O-methylcytidine-3'-phosphate
  modified_base 9: mod_base = OTHER; note = 2'-deoxy-2'-fluoroadenosine-3'-phosphate
  modified_base 10: mod_base = OTHER; note = 2'-deoxy-2'-fluoroadenosine-3'-phosphate
  modified_base 11: mod_base = OTHER; note = 2'-deoxy-2'-fluorocytidine-3'-phosphate
  modified_base 12: mod_base = OTHER; note = 2'-O-methyladenosine-3'-phosphate
  modified_base 13: mod_base = OTHER; note = 2'-deoxy-2'-fluoroadenosine-3'-phosphate
  modified_base 14: mod_base = OTHER; note = 2'-O-methylguanosine-3'-phosphate
  modified_base 15: mod_base = OTHER; note = 2'-deoxy-2'-fluorouridine-3'-phosphate
  modified_base 16: mod_base = OTHER; note = 2'-O-methyladenosine-3'-phosphate
  modified_base 17: mod_base = OTHER; note = 2'-deoxy-2'-fluorocytidine-3'-phosphate
  modified_base 18: mod_base = OTHER; note = 2'-O-methylcytidine-3'-phosphate
  modified_base 19: mod_base = OTHER; note = 2'-deoxy-2'-fluorouridine-3'-phosphate
  modified_base 20: mod_base = OTHER; note = 2'-O-methyluridine-3'-phosphate
  modified_base 21: mod_base = OTHER; note = 2'-deoxy-2'-fluorouridine-3'-phosphate ((2S,4R)-1-[29-[[2-(acetylamino)-2-deoxy-beta-D-galactopyra nosyl]oxy]-14,14-bis[[3-[[3-[[5-[[2-(acetylamino)-2-deoxy-b eta-D-galactopyranosyl]oxy]-1-oxopentyl]amino]propyl]amino] -3-oxopropoxy]methyl]-1,12,19,25-tetraoxo-16-oxa-13,20,24-t riazanonacos-1-yl]-4-hydroxy-2-pyrrolidinyl)methyl ester
atttaaacaacaagtaccttt

SEQ ID NO: 125 - RNA, 21 nt, synthetic construct
  source 1..21: mol_type = other RNA
  modified_base 1: mod_base = OTHER; note = 2'-deoxy-2'-fluoroadenosine-3'-phosphate
  modified_base 2: mod_base = OTHER; note = 2'-O-methyluridine-3'-phosphate
  modified_base 3: mod_base = OTHER; note = 2'-deoxy-2'-fluorouridine-3'-phosphate
  modified_base 4: mod_base = OTHER; note = 2'-O-methylcytidine-3'-phosphate
  modified_base 5: mod_base = OTHER; note = 2'-deoxy-2'-fluoroadenosine-3'-phosphate
  modified_base 6: mod_base = OTHER; note = 2'-O-methylguanosine-3'-phosphate
  modified_base 7: mod_base = OTHER; note = 2'-deoxy-2'-fluoroadenosine-3'-phosphate
  modified_base 8: mod_base = OTHER; note = 2'-O-methyladenosine-3'-phosphate
  modified_base 9: mod_base = OTHER; note = 2'-deoxy-2'-fluoroadenosine-3'-phosphate
  modified_base 10: mod_base = OTHER; note = 2'-deoxy-2'-fluoroguanosine-3'-phosphate
  modified_base 11: mod_base = OTHER; note = 2'-deoxy-2'-fluorouridine-3'-phosphate
  modified_base 12: mod_base = OTHER; note = 2'-O-methylcytidine-3'-phosphate
  modified_base 13: mod_base = OTHER; note = 2'-deoxy-2'-fluorouridine-3'-phosphate
  modified_base 14: mod_base = OTHER; note = 2'-O-methylguanosine-3'-phosphate
  modified_base 15: mod_base = OTHER; note = 2'-deoxy-2'-fluorouridine-3'-phosphate
  modified_base 16: mod_base = OTHER; note = 2'-O-methylguanosine-3'-phosphate
  modified_base 17: mod_base = OTHER; note = 2'-deoxy-2'-fluoroadenosine-3'-phosphate
  modified_base 18: mod_base = OTHER; note = 2'-O-methyladenosine-3'-phosphate
  modified_base 19: mod_base = OTHER; note = 2'-deoxy-2'-fluoroguanosine-3'-phosphate
  modified_base 20: mod_base = OTHER; note = 2'-O-methylguanosine-3'-phosphate
  modified_base 21: mod_base = OTHER; note = 2'-deoxy-2'-fluoroadenosine-3'-phosphate ((2S,4R)-1-[29-[[2-(acetylamino)-2-deoxy-beta-D-galactopyra nosyl]oxy]-14,14-bis[[3-[[3-[[5-[[2-(acetylamino)-2-deoxy-b eta-D-galactopyranosyl]oxy]-1-oxopentyl]amino]propyl]amino] -3-oxopropoxy]methyl]-1,12,19,25-tetraoxo-16-oxa-13,20,24-t riazanonacos-1-yl]-4-hydroxy-2-pyrrolidinyl)methyl ester
attcagaaagtctgtgaagga

SEQ ID NO: 126 - RNA, 21 nt, synthetic construct
  source 1..21: mol_type = other RNA
  modified_base 1: mod_base = OTHER; note = 2'-deoxy-2'-fluoroadenosine-3'-phosphate
  modified_base 2: mod_base = OTHER; note = 2'-O-methylcytidine-3'-phosphate
  modified_base 3: mod_base = OTHER; note = 2'-deoxy-2'-fluoroadenosine-3'-phosphate
  modified_base 4: mod_base = OTHER; note = 2'-O-methylcytidine-3'-phosphate
  modified_base 5: mod_base = OTHER; note = 2'-deoxy-2'-fluorouridine-3'-phosphate
  modified_base 6: mod_base = OTHER; note = 2'-O-methylguanosine-3'-phosphate
  modified_base 7: mod_base = OTHER; note = 2'-deoxy-2'-fluoroadenosine-3'-phosphate
  modified_base 8: mod_base = OTHER; note = 2'-O-methyladenosine-3'-phosphate
  modified_base 9: mod_base = OTHER; note = 2'-deoxy-2'-fluoroguanosine-3'-phosphate
  modified_base 10: mod_base = OTHER; note = 2'-deoxy-2'-fluorocytidine-3'-phosphate
  modified_base 11: mod_base = OTHER; note = 2'-deoxy-2'-fluoroadenosine-3'-phosphate
  modified_base 12: mod_base = OTHER; note = 2'-O-methyluridine-3'-phosphate
  modified_base 13: mod_base = OTHER; note = 2'-deoxy-2'-fluorouridine-3'-phosphate
  modified_base 14: mod_base = OTHER; note = 2'-O-methyluridine-3'-phosphate
  modified_base 15: mod_base = OTHER; note = 2'-deoxy-2'-fluoroguanosine-3'-phosphate
  modified_base 16: mod_base = OTHER; note = 2'-O-methyladenosine-3'-phosphate
  modified_base 17: mod_base = OTHER; note = 2'-deoxy-2'-fluorouridine-3'-phosphate
  modified_base 18: mod_base = OTHER; note = 2'-O-methylguanosine-3'-phosphate
  modified_base 19: mod_base = OTHER; note = 2'-deoxy-2'-fluorocytidine-3'-phosphate
  modified_base 20: mod_base = OTHER; note = 2'-O-methyladenosine-3'-phosphate
  modified_base 21: mod_base = OTHER; note = 2'-deoxy-2'-fluoroadenosine-3'-phosphate ((2S,4R)-1-[29-[[2-(acetylamino)-2-deoxy-beta-D-galactopyra nosyl]oxy]-14,14-bis[[3-[[3-[[5-[[2-(acetylamino)-2-deoxy-b eta-D-galactopyranosyl]oxy]-1-oxopentyl]amino]propyl]amino] -3-oxopropoxy]methyl]-1,12,19,25-tetraoxo-16-oxa-13,20,24-t riazanonacos-1-yl]-4-hydroxy-2-pyrrolidinyl)methyl ester
acactgaagcatttgatgcaa

SEQ ID NO: 127 - RNA, 21 nt, synthetic construct
  source 1..21: mol_type = other RNA
  modified_base 1: mod_base = OTHER; note = 2'-deoxy-2'-fluoroguanosine-3'-phosphate
  modified_base 2: mod_base = OTHER; note = 2'-O-methylcytidine-3'-phosphate
  modified_base 3: mod_base = OTHER; note = 2'-deoxy-2'-fluoroadenosine-3'-phosphate
  modified_base 4: mod_base = OTHER; note = 2'-O-methylguanosine-3'-phosphate
  modified_base 5: mod_base = OTHER; note = 2'-deoxy-2'-fluorouridine-3'-phosphate
  modified_base 6: mod_base = OTHER; note = 2'-O-methyluridine-3'-phosphate
  modified_base 7: mod_base = OTHER; note = 2'-deoxy-2'-fluorocytidine-3'-phosphate
  modified_base 8: mod_base = OTHER; note = 2'-O-methyluridine-3'-phosphate
  modified_base 9: mod_base = OTHER; note = 2'-deoxy-2'-fluoroguanosine-3'-phosphate
  modified_base 10: mod_base = OTHER; note = 2'-deoxy-2'-fluorouridine-3'-phosphate
  modified_base 11: mod_base = OTHER; note = 2'-deoxy-2'-fluoroguanosine-3'-phosphate
  modified_base 12: mod_base = OTHER; note = 2'-O-methyluridine-3'-phosphate
  modified_base 13: mod_base = OTHER; note = 2'-deoxy-2'-fluorouridine-3'-phosphate
  modified_base 14: mod_base = OTHER; note = 2'-O-methyladenosine-3'-phosphate
  modified_base 15: mod_base = OTHER; note = 2'-deoxy-2'-fluoroadenosine-3'-phosphate
  modified_base 16: mod_base = OTHER; note = 2'-O-methyladenosine-3'-phosphate
  modified_base 17: mod_base = OTHER; note = 2'-deoxy-2'-fluoroadenosine-3'-phosphate
  modified_base 18: mod_base = OTHER; note = 2'-O-methyluridine-3'-phosphate
  modified_base 19: mod_base = OTHER; note = 2'-deoxy-2'-fluoroguanosine-3'-phosphate
  modified_base 20: mod_base = OTHER; note = 2'-O-methyluridine-3'-phosphate
  modified_base 21: mod_base = OTHER; note = 2'-deoxy-2'-fluorocytidine-3'-phosphate ((2S,4R)-1-[29-[[2-(acetylamino)-2-deoxy-beta-D-galactopyra nosyl]oxy]-14,14-bis[[3-[[3-[[5-[[2-(acetylamino)-2-deoxy-b eta-D-galactopyranosyl]oxy]-1-oxopentyl]amino]propyl]amino] -3-oxopropoxy]methyl]-1,12,19,25-tetraoxo-16-oxa-13,20,24-t riazanonacos-1-yl]-4-hydroxy-2-pyrrolidinyl)methyl ester
gcagttctgtgttaaaatgtc

SEQ ID NO: 128 - RNA, 21 nt, synthetic construct
  source 1..21: mol_type = other RNA
  modified_base 1: mod_base = OTHER; note = 2'-deoxy-2'-fluoroadenosine-3'-phosphate
  modified_base 2: mod_base = OTHER; note = 2'-O-methylguanosine-3'-phosphate
  modified_base 3: mod_base = OTHER; note = 2'-deoxy-2'-fluoroguanosine-3'-phosphate
  modified_base 4: mod_base = OTHER; note = 2'-O-methyladenosine-3'-phosphate
  modified_base 5: mod_base = OTHER; note = 2'-deoxy-2'-fluorouridine-3'-phosphate
  modified_base 6: mod_base = OTHER; note = 2'-O-methyluridine-3'-phosphate
  modified_base 7: mod_base = OTHER; note = 2'-deoxy-2'-fluorouridine-3'-phosphate
  modified_base 8: mod_base = OTHER; note = 2'-O-methyluridine-3'-phosphate
  modified_base 9: mod_base = OTHER; note = 2'-deoxy-2'-fluoroguanosine-3'-phosphate
  modified_base 10: mod_base = OTHER; note = 2'-deoxy-2'-fluoroadenosine-3'-phosphate
  modified_base 11: mod_base = OTHER; note = 2'-deoxy-2'-fluoroguanosine-3'-phosphate
  modified_base 12: mod_base = OTHER; note = 2'-O-methyluridine-3'-phosphate
  modified_base 13: mod_base = OTHER; note = 2'-deoxy-2'-fluoroguanosine-3'-phosphate
  modified_base 14: mod_base = OTHER; note = 2'-O-methyluridine-3'-phosphate
  modified_base 15: mod_base = OTHER; note = 2'-deoxy-2'-fluoroadenosine-3'-phosphate
  modified_base 16: mod_base = OTHER; note = 2'-O-methyladenosine-3'-phosphate
  modified_base 17: mod_base = OTHER; note = 2'-deoxy-2'-fluoroadenosine-3'-phosphate
  modified_base 18: mod_base = OTHER; note = 2'-O-methyladenosine-3'-phosphate
  modified_base 19: mod_base = OTHER; note = 2'-deoxy-2'-fluoroguanosine-3'-phosphate
  modified_base 20: mod_base = OTHER; note = 2'-O-methylguanosine-3'-phosphate
  modified_base 21: mod_base = OTHER; note = 2'-deoxy-2'-fluoroadenosine-3'-phosphate ((2S,4R)-1-[29-[[2-(acetylamino)-2-deoxy-beta-D-galactopyra nosyl]oxy]-14,14-bis[[3-[[3-[[5-[[2-(acetylamino)-2-deoxy-b eta-D-galactopyranosyl]oxy]-1-oxopentyl]amino]propyl]amino] -3-oxopropoxy]methyl]-1,12,19,25-tetraoxo-16-oxa-13,20,24-t riazanonacos-1-yl]-4-hydroxy-2-pyrrolidinyl)methyl ester
aggattttgagtgtaaaagga

SEQ ID NO: 129 - RNA, 21 nt, synthetic construct
  source 1..21: mol_type = other RNA
  modified_base 1: mod_base = OTHER; note = 2'-deoxy-2'-fluoroadenosine-3'-phosphate
  modified_base 2: mod_base = OTHER; note = 2'-O-methyladenosine-3'-phosphate
  modified_base 3: mod_base = OTHER; note = 2'-deoxy-2'-fluorouridine-3'-phosphate
  modified_base 4: mod_base = OTHER; note = 2'-O-methylguanosine-3'-phosphate
  modified_base 5: mod_base = OTHER; note = 2'-deoxy-2'-fluoroadenosine-3'-phosphate
  modified_base 6: mod_base = OTHER; note = 2'-O-methyluridine-3'-phosphate
  modified_base 7: mod_base = OTHER; note = 2'-deoxy-2'-fluoroguanosine-3'-phosphate
  modified_base 8: mod_base = OTHER; note = 2'-O-methyladenosine-3'-phosphate
  modified_base 9: mod_base = OTHER; note = 2'-deoxy-2'-fluoroadenosine-3'-phosphate
  modified_base 10: mod_base = OTHER; note = 2'-deoxy-2'-fluorocytidine-3'-phosphate
  modified_base 11: mod_base = OTHER; note = 2'-deoxy-2'-fluorocytidine-3'-phosphate
  modified_base 12: mod_base = OTHER; note = 2'-O-methyluridine-3'-phosphate
  modified_base 13: mod_base = OTHER; note = 2'-deoxy-2'-fluorouridine-3'-phosphate
  modified_base 14: mod_base = OTHER; note = 2'-O-methylguanosine-3'-phosphate
  modified_base 15: mod_base = OTHER; note = 2'-deoxy-2'-fluorouridine-3'-phosphate
  modified_base 16: mod_base = OTHER; note = 2'-O-methyladenosine-3'-phosphate
  modified_base 17: mod_base = OTHER; note = 2'-deoxy-2'-fluoroadenosine-3'-phosphate
  modified_base 18: mod_base = OTHER; note = 2'-O-methyladenosine-3'-phosphate
  modified_base 19: mod_base = OTHER; note = 2'-deoxy-2'-fluoroguanosine-3'-phosphate
  modified_base 20: mod_base = OTHER; note = 2'-O-methyladenosine-3'-phosphate
  modified_base 21: mod_base = OTHER; note = 2'-deoxy-2'-fluoroadenosine-3'-phosphate ((2S,4R)-1-[29-[[2-(acetylamino)-2-deoxy-beta-D-galactopyra nosyl]oxy]-14,14-bis[[3-[[3-[[5-[[2-(acetylamino)-2-deoxy-b eta-D-galactopyranosyl]oxy]-1-oxopentyl]amino]propyl]amino] -3-oxopropoxy]methyl]-1,12,19,25-tetraoxo-16-oxa-13,20,24-t riazanonacos-1-yl]-4-hydroxy-2-pyrrolidinyl)methyl ester
aatgatgaaccttgtaaagaa

SEQ ID NO: 130 - RNA, 21 nt, synthetic construct
  source 1..21: mol_type = other RNA
  modified_base 1: mod_base = OTHER; note = 2'-deoxy-2'-fluoroadenosine-3'-phosphate
  modified_base 2: mod_base = OTHER; note = 2'-O-methyluridine-3'-phosphate
  modified_base 3: mod_base = OTHER; note = 2'-deoxy-2'-fluorocytidine-3'-phosphate
  modified_base 4: mod_base = OTHER; note = 2'-O-methyladenosine-3'-phosphate
  modified_base 5: mod_base = OTHER; note = 2'-deoxy-2'-fluorouridine-3'-phosphate
  modified_base 6: mod_base = OTHER; note = 2'-O-methyluridine-3'-phosphate
  modified_base 7: mod_base = OTHER; note = 2'-deoxy-2'-fluoroguanosine-3'-phosphate
  modified_base 8: mod_base = OTHER; note = 2'-O-methylguanosine-3'-phosphate
  modified_base 9: mod_base = OTHER; note = 2'-deoxy-2'-fluoroadenosine-3'-phosphate
  modified_base 10: mod_base = OTHER; note = 2'-deoxy-2'-fluoroadenosine-3'-phosphate
  modified_base 11: mod_base = OTHER; note = 2'-deoxy-2'-fluorocytidine-3'-phosphate
  modified_base 12: mod_base = OTHER; note = 2'-O-methyladenosine-3'-phosphate
  modified_base 13: mod_base = OTHER; note = 2'-deoxy-2'-fluorouridine-3'-phosphate
  modified_base 14: mod_base = OTHER; note = 2'-O-methyluridine-3'-phosphate
  modified_base 15: mod_base = OTHER; note = 2'-deoxy-2'-fluorouridine-3'-phosphate
  modified_base 16: mod_base = OTHER; note = 2'-O-methyluridine-3'-phosphate
  modified_base 17: mod_base = OTHER; note = 2'-deoxy-2'-fluorouridine-3'-phosphate
  modified_base 18: mod_base = OTHER; note = 2'-O-methylcytidine-3'-phosphate
  modified_base 19: mod_base = OTHER; note = 2'-deoxy-2'-fluoroadenosine-3'-phosphate
  modified_base 20: mod_base = OTHER; note = 2'-O-methyluridine-3'-phosphate
  modified_base 21: mod_base = OTHER; note = 2'-deoxy-2'-fluorouridine-3'-phosphate ((2S,4R)-1-[29-[[2-(acetylamino)-2-deoxy-beta-D-galactopyra nosyl]oxy]-14,14-bis[[3-[[3-[[5-[[2-(acetylamino)-2-deoxy-b eta-D-galactopyranosyl]oxy]-1-oxopentyl]amino]propyl]amino] -3-oxopropoxy]methyl]-1,12,19,25-tetraoxo-16-oxa-13,20,24-t riazanonacos-1-yl]-4-hydroxy-2-pyrrolidinyl)methyl ester
atcattggaacatttttcatt

SEQ ID NO: 131 - RNA, 21 nt, synthetic construct
  source 1..21: mol_type = other RNA
  modified_base 1: mod_base = OTHER; note = 2'-deoxy-2'-fluoroadenosine-3'-phosphate
  modified_base 2: mod_base = OTHER; note = 2'-O-methylguanosine-3'-phosphate
  modified_base 3: mod_base = OTHER; note = 2'-deoxy-2'-fluorocytidine-3'-phosphate
  modified_base 4: mod_base = OTHER; note = 2'-O-methylcytidine-3'-phosphate
  modified_base 5: mod_base = OTHER; note = 2'-deoxy-2'-fluoroadenosine-3'-phosphate
  modified_base 6: mod_base = OTHER; note = 2'-O-methylguanosine-3'-phosphate
  modified_base 7: mod_base = OTHER; note = 2'-deoxy-2'-fluoroadenosine-3'-phosphate
  modified_base 8: mod_base = OTHER; note = 2'-O-methyladenosine-3'-phosphate
  modified_base 9: mod_base = OTHER; note = 2'-deoxy-2'-fluoroadenosine-3'-phosphate
  modified_base 10: mod_base = OTHER; note = 2'-deoxy-2'-fluorouridine-3'-phosphate
  modified_base 11: mod_base = OTHER; note = 2'-deoxy-2'-fluorouridine-3'-phosphate
  modified_base 12: mod_base = OTHER; note = 2'-O-methylcytidine-3'-phosphate
  modified_base 13: mod_base = OTHER; note = 2'-deoxy-2'-fluoroguanosine-3'-phosphate
  modified_base 14: mod_base = OTHER; note = 2'-O-methylguanosine-3'-phosphate
  modified_base 15: mod_base = OTHER; note = 2'-deoxy-2'-fluoroadenosine-3'-phosphate
  modified_base 16: mod_base = OTHER; note = 2'-O-methylguanosine-3'-phosphate
  modified_base 17: mod_base = OTHER; note = 2'-deoxy-2'-fluorouridine-3'-phosphate
  modified_base 18: mod_base = OTHER; note = 2'-O-methyluridine-3'-phosphate
  modified_base 19: mod_base = OTHER; note = 2'-deoxy-2'-fluoroadenosine-3'-phosphate
  modified_base 20: mod_base = OTHER; note = 2'-O-methyluridine-3'-phosphate
  modified_base 21: mod_base = OTHER; note = 2'-deoxy-2'-fluorouridine-3'-phosphate ((2S,4R)-1-[29-[[2-(acetylamino)-2-deoxy-beta-D-galactopyra nosyl]oxy]-14,14-bis[[3-[[3-[[5-[[2-(acetylamino)-2-deoxy-b eta-D-galactopyranosyl]oxy]-1-oxopentyl]amino]propyl]amino] -3-oxopropoxy]methyl]-1,12,19,25-tetraoxo-16-oxa-13,20,24-t riazanonacos-1-yl]-4-hydroxy-2-pyrrolidinyl)methyl ester
agccagaaattcggagttatt

SEQ ID NO: 132 - RNA, 21 nt, synthetic construct
  source 1..21: mol_type = other RNA
  modified_base 1: mod_base = OTHER; note = 2'-deoxy-2'-fluorouridine-3'-phosphate
  modified_base 2: mod_base = OTHER; note = 2'-O-methylcytidine-3'-phosphate
  modified_base 3: mod_base = OTHER; note = 2'-deoxy-2'-fluorocytidine-3'-phosphate
  modified_base 4: mod_base = OTHER; note = 2'-O-methylcytidine-3'-phosphate
  modified_base 5: mod_base = OTHER; note = 2'-deoxy-2'-fluorouridine-3'-phosphate
  modified_base 6: mod_base = OTHER; note = 2'-O-methylguanosine-3'-phosphate
  modified_base 7: mod_base = OTHER; note = 2'-deoxy-2'-fluoroguanosine-3'-phosphate
  modified_base 8: mod_base = OTHER; note = 2'-O-methylguanosine-3'-phosphate
  modified_base 9: mod_base = OTHER; note = 2'-deoxy-2'-fluoroadenosine-3'-phosphate
  modified_base 10: mod_base = OTHER; note = 2'-deoxy-2'-fluoroguanosine-3'-phosphate
  modified_base 11: mod_base = OTHER; note = 2'-deoxy-2'-fluoroadenosine-3'-phosphate
  modified_base 12: mod_base = OTHER; note = 2'-O-methyluridine-3'-phosphate
  modified_base 13: mod_base = OTHER; note = 2'-deoxy-2'-fluoroadenosine-3'-phosphate
  modified_base 14: mod_base = OTHER; note = 2'-O-methyladenosine-3'-phosphate
  modified_base 15: mod_base = OTHER; note = 2'-deoxy-2'-fluoroadenosine-3'-phosphate
  modified_base 16: mod_base = OTHER; note = 2'-O-methyladenosine-3'-phosphate
  modified_base 17: mod_base = OTHER; note = 2'-deoxy-2'-fluorocytidine-3'-phosphate
  modified_base 18: mod_base = OTHER; note = 2'-O-methyluridine-3'-phosphate
  modified_base 19: mod_base = OTHER; note = 2'-deoxy-2'-fluorocytidine-3'-phosphate
  modified_base 20: mod_base = OTHER; note = 2'-O-methyladenosine-3'-phosphate
  modified_base 21: mod_base = OTHER; note = 2'-deoxy-2'-fluorocytidine-3'-phosphate ((2S,4R)-1-[29-[[2-(acetylamino)-2-deoxy-beta-D-galactopyra nosyl]oxy]-14,14-bis[[3-[[3-[[5-[[2-(acetylamino)-2-deoxy-b eta-D-galactopyranosyl]oxy]-1-oxopentyl]amino]propyl]amino] -3-oxopropoxy]methyl]-1,12,19,25-tetraoxo-16-oxa-13,20,24-t riazanonacos-1-yl]-4-hydroxy-2-pyrrolidinyl)methyl ester
tccctgggagataaaactcac

SEQ ID NO: 133 - RNA, 21 nt, synthetic construct
  source 1..21: mol_type = other RNA
  modified_base 1: mod_base = OTHER; note = 2'-deoxy-2'-fluoroguanosine-3'-phosphate
  modified_base 2: mod_base = OTHER; note = 2'-O-methyladenosine-3'-phosphate
  modified_base 3: mod_base = OTHER; note = 2'-deoxy-2'-fluoroadenosine-3'-phosphate
  modified_base 4: mod_base = OTHER; note = 2'-O-methyladenosine-3'-phosphate
  modified_base 5: mod_base = OTHER; note = 2'-deoxy-2'-fluoroadenosine-3'-phosphate
  modified_base 6: mod_base = OTHER; note = 2'-O-methyluridine-3'-phosphate
  modified_base 7: mod_base = OTHER; note = 2'-deoxy-2'-fluoroguanosine-3'-phosphate
  modified_base 8: mod_base = OTHER; note = 2'-O-methyladenosine-3'-phosphate
  modified_base 9: mod_base = OTHER; note = 2'-deoxy-2'-fluorouridine-3'-phosphate
  modified_base 10: mod_base = OTHER; note = 2'-deoxy-2'-fluoroguanosine-3'-phosphate
  modified_base 11: mod_base = OTHER; note = 2'-deoxy-2'-fluoroadenosine-3'-phosphate
  modified_base 12: mod_base = OTHER; note = 2'-O-methyladenosine-3'-phosphate
  modified_base 13: mod_base = OTHER; note = 2'-deoxy-2'-fluorocytidine-3'-phosphate
  modified_base 14: mod_base = OTHER; note = 2'-O-methylcytidine-3'-phosphate
  modified_base 15: mod_base = OTHER; note = 2'-deoxy-2'-fluorouridine-3'-phosphate
  modified_base 16: mod_base = OTHER; note = 2'-O-methyluridine-3'-phosphate
  modified_base 17: mod_base = OTHER; note = 2'-deoxy-2'-fluoroguanosine-3'-phosphate
  modified_base 18: mod_base = OTHER; note = 2'-O-methyluridine-3'-phosphate
  modified_base 19: mod_base = OTHER; note = 2'-deoxy-2'-fluoroadenosine-3'-phosphate
  modified_base 20: mod_base = OTHER; note = 2'-O-methyladenosine-3'-phosphate
  modified_base 21: mod_base = OTHER; note = 2'-deoxy-2'-fluoroadenosine-3'-phosphate ((2S,4R)-1-[29-[[2-(acetylamino)-2-deoxy-beta-D-galactopyra nosyl]oxy]-14,14-bis[[3-[[3-[[5-[[2-(acetylamino)-2-deoxy-b eta-D-galactopyranosyl]oxy]-1-oxopentyl]amino]propyl]amino] -3-oxopropoxy]methyl]-1,12,19,25-tetraoxo-16-oxa-13,20,24-t riazanonacos-1-yl]-4-hydroxy-2-pyrrolidinyl)methyl ester
gaaaatgatgaaccttgtaaa

SEQ ID NO: 134 - RNA, 21 nt, synthetic construct
  source 1..21: mol_type = other RNA
  modified_base 1: mod_base = OTHER; note = 2'-deoxy-2'-fluoroadenosine-3'-phosphate
  modified_base 2: mod_base = OTHER; note = 2'-O-methyluridine-3'-phosphate
  modified_base 3: mod_base = OTHER; note = 2'-deoxy-2'-fluorouridine-3'-phosphate
  modified_base 4: mod_base = OTHER; note = 2'-O-methylguanosine-3'-phosphate
  modified_base 5: mod_base = OTHER; note = 2'-deoxy-2'-fluorocytidine-3'-phosphate
  modified_base 6: mod_base = OTHER; note = 2'-O-methyluridine-3'-phosphate
  modified_base 7: mod_base = OTHER; note = 2'-deoxy-2'-fluorocytidine-3'-phosphate
  modified_base 8: mod_base = OTHER; note = 2'-O-methyladenosine-3'-phosphate
  modified_base 9: mod_base = OTHER; note = 2'-deoxy-2'-fluoroadenosine-3'-phosphate
  modified_base 10: mod_base = OTHER; note = 2'-deoxy-2'-fluoroguanosine-3'-phosphate
  modified_base 11: mod_base = OTHER; note = 2'-deoxy-2'-fluorouridine-3'-phosphate
  modified_base 12: mod_base = OTHER; note = 2'-O-methylcytidine-3'-phosphate
  modified_base 13: mod_base = OTHER; note = 2'-deoxy-2'-fluoroadenosine-3'-phosphate
  modified_base 14: mod_base = OTHER; note = 2'-O-methylcytidine-3'-phosphate
  modified_base 15: mod_base = OTHER; note = 2'-deoxy-2'-fluoroadenosine-3'-phosphate
  modified_base 16: mod_base = OTHER; note = 2'-O-methyluridine-3'-phosphate
  modified_base 17: mod_base = OTHER; note = 2'-deoxy-2'-fluorouridine-3'-phosphate
  modified_base 18: mod_base = OTHER; note = 2'-O-methyluridine-3'-phosphate
  modified_base 19: mod_base = OTHER; note = 2'-deoxy-2'-fluoroguanosine-3'-phosphate
  modified_base 20: mod_base = OTHER; note = 2'-O-methyladenosine-3'-phosphate
  modified_base 21: mod_base = OTHER; note = 2'-deoxy-2'-fluorouridine-3'-phosphate ((2S,4R)-1-[29-[[2-(acetylamino)-2-deoxy-beta-D-galactopyra nosyl]oxy]-14,14-bis[[3-[[3-[[5-[[2-(acetylamino)-2-deoxy-b eta-D-galactopyranosyl]oxy]-1-oxopentyl]amino]propyl]amino] -3-oxopropoxy]methyl]-1,12,19,25-tetraoxo-16-oxa-13,20,24-t riazanonacos-1-yl]-4-hydroxy-2-pyrrolidinyl)methyl ester
attgctcaagtcacatttgat

SEQ ID NO: 135 - RNA, 21 nt, synthetic construct
  source 1..21: mol_type = other RNA
  modified_base 1: mod_base = OTHER; note = 2'-deoxy-2'-fluoroguanosine-3'-phosphate
  modified_base 2: mod_base = OTHER; note = 2'-O-methyladenosine-3'-phosphate
  modified_base 3: mod_base = OTHER; note = 2'-deoxy-2'-fluoroguanosine-3'-phosphate
  modified_base 4: mod_base = OTHER; note = 2'-O-methyladenosine-3'-phosphate
  modified_base 5: mod_base = OTHER; note = 2'-deoxy-2'-fluorouridine-3'-phosphate
  modified_base 6: mod_base = OTHER; note = 2'-O-methyluridine-3'-phosphate
  modified_base 7: mod_base = OTHER; note = 2'-deoxy-2'-fluoroguanosine-3'-phosphate
  modified_base 8: mod_base = OTHER; note = 2'-O-methylcytidine-3'-phosphate
  modified_base 9: mod_base = OTHER; note = 2'-deoxy-2'-fluoroadenosine-3'-phosphate
  modified_base 10: mod_base = OTHER; note = 2'-deoxy-2'-fluorouridine-3'-phosphate
  modified_base 11: mod_base = OTHER; note = 2'-deoxy-2'-fluoroadenosine-3'-phosphate
  modified_base 12: mod_base = OTHER; note = 2'-O-methyluridine-3'-phosphate
  modified_base 13: mod_base = OTHER; note = 2'-deoxy-2'-fluoroguanosine-3'-phosphate
  modified_base 14: mod_base = OTHER; note = 2'-O-methylcytidine-3'-phosphate
  modified_base 15: mod_base = OTHER; note = 2'-deoxy-2'-fluorouridine-3'-phosphate
  modified_base 16: mod_base = OTHER; note = 2'-O-methyluridine-3'-phosphate
  modified_base 17: mod_base = OTHER; note = 2'-deoxy-2'-fluoroadenosine-3'-phosphate
  modified_base 18: mod_base = OTHER; note = 2'-O-methyluridine-3'-phosphate
  modified_base 19: mod_base = OTHER; note = 2'-deoxy-2'-fluoroadenosine-3'-phosphate
  modified_base 20: mod_base = OTHER; note = 2'-O-methyladenosine-3'-phosphate
  modified_base 21: mod_base = OTHER; note = 2'-deoxy-2'-fluoroadenosine-3'-phosphate ((2S,4R)-1-[29-[[2-(acetylamino)-2-deoxy-beta-D-galactopyra nosyl]oxy]-14,14-bis[[3-[[3-[[5-[[2-(acetylamino)-2-deoxy-b eta-D-galactopyranosyl]oxy]-1-oxopentyl]amino]propyl]amino] -3-oxopropoxy]methyl]-1,12,19,25-tetraoxo-16-oxa-13,20,24-t riazanonacos-1-yl]-4-hydroxy-2-pyrrolidinyl)methyl ester
gagattgcatatgcttataaa

SEQ ID NO: 136 - RNA, 21 nt, synthetic construct
  source 1..21: mol_type = other RNA
  modified_base 1: mod_base = OTHER; note = 2'-deoxy-2'-fluoroguanosine-3'-phosphate
  modified_base 2: mod_base = OTHER; note = 2'-O-methyluridine-3'-phosphate
  modified_base 3: mod_base = OTHER; note = 2'-deoxy-2'-fluorouridine-3'-phosphate
  modified_base 4: mod_base = OTHER; note = 2'-O-methyladenosine-3'-phosphate
  modified_base 5: mod_base = OTHER; note = 2'-deoxy-2'-fluorouridine-3'-phosphate
  modified_base 6: mod_base = OTHER; note = 2'-O-methylcytidine-3'-phosphate
  modified_base 7: mod_base = OTHER; note = 2'-deoxy-2'-fluorocytidine-3'-phosphate
  modified_base 8: mod_base = OTHER; note = 2'-O-methyluridine-3'-phosphate
  modified_base 9: mod_base = OTHER; note = 2'-deoxy-2'-fluoroguanosine-3'-phosphate
  modified_base 10: mod_base = OTHER; note = 2'-deoxy-2'-fluoroadenosine-3'-phosphate
  modified_base 11: mod_base = OTHER; note = 2'-deoxy-2'-fluorouridine-3'-phosphate
  modified_base 12: mod_base = OTHER; note = 2'-O-methyladenosine-3'-phosphate
  modified_base 13: mod_base = OTHER; note = 2'-deoxy-2'-fluoroadenosine-3'-phosphate
  modified_base 14: mod_base = OTHER; note = 2'-O-methyladenosine-3'-phosphate
  modified_base 15: mod_base = OTHER; note = 2'-deoxy-2'-fluoroadenosine-3'-phosphate
  modified_base 16: mod_base = OTHER; note = 2'-O-methyladenosine-3'-phosphate
  modified_base 17: mod_base = OTHER; note = 2'-deoxy-2'-fluoroadenosine-3'-phosphate
  modified_base 18: mod_base = OTHER; note = 2'-O-methyluridine-3'-phosphate
  modified_base 19: mod_base = OTHER; note = 2'-deoxy-2'-fluorouridine-3'-phosphate
  modified_base 20: mod_base = OTHER; note = 2'-O-methyluridine-3'-phosphate
  modified_base 21: mod_base = OTHER; note = 2'-deoxy-2'-fluoroadenosine-3'-phosphate ((2S,4R)-1-[29-[[2-(acetylamino)-2-deoxy-beta-D-galactopyra nosyl]oxy]-14,14-bis[[3-[[3-[[5-[[2-(acetylamino)-2-deoxy-b eta-D-galactopyranosyl]oxy]-1-oxopentyl]amino]propyl]amino] -3-oxopropoxy]methyl]-1,12,19,25-tetraoxo-16-oxa-13,20,24-t riazanonacos-1-yl]-4-hydroxy-2-pyrrolidinyl)methyl ester
gttatcctgataaaaaattta

SEQ ID NO: 137 - RNA, 21 nt, synthetic construct
  source 1..21: mol_type = other RNA
  modified_base 1: mod_base = OTHER; note = 2'-deoxy-2'-fluoroadenosine-3'-phosphate
  modified_base 2: mod_base = OTHER; note = 2'-O-methylguanosine-3'-phosphate
  modified_base 3: mod_base = OTHER; note = 2'-deoxy-2'-fluoroguanosine-3'-phosphate
  modified_base 4: mod_base = OTHER; note = 2'-O-methyladenosine-3'-phosphate
  modified_base 5: mod_base = OTHER; note = 2'-deoxy-2'-fluoroadenosine-3'-phosphate
  modified_base 6: mod_base = OTHER; note = 2'-O-methylguanosine-3'-phosphate
  modified_base 7: mod_base = OTHER; note = 2'-deoxy-2'-fluorouridine-3'-phosphate
  modified_base 8: mod_base = OTHER; note = 2'-O-methyluridine-3'-phosphate
  modified_base 9: mod_base = OTHER; note = 2'-deoxy-2'-fluorouridine-3'-phosphate
  modified_base 10: mod_base = OTHER; note = 2'-deoxy-2'-fluoroguanosine-3'-phosphate
  modified_base 11: mod_base = OTHER; note = 2'-deoxy-2'-fluorocytidine-3'-phosphate
  modified_base 12: mod_base = OTHER; note = 2'-O-methyladenosine-3'-phosphate
  modified_base 13: mod_base = OTHER; note = 2'-deoxy-2'-fluoroguanosine-3'-phosphate
  modified_base 14: mod_base = OTHER; note = 2'-O-methylcytidine-3'-phosphate
  modified_base 15: mod_base = OTHER; note = 2'-deoxy-2'-fluorouridine-3'-phosphate
  modified_base 16: mod_base = OTHER; note = 2'-O-methyluridine-3'-phosphate
  modified_base 17: mod_base = OTHER; note = 2'-deoxy-2'-fluorouridine-3'-phosphate
  modified_base 18: mod_base = OTHER; note = 2'-O-methyluridine-3'-phosphate
  modified_base 19: mod_base = OTHER; note = 2'-deoxy-2'-fluoroadenosine-3'-phosphate
  modified_base 20: mod_base = OTHER; note = 2'-O-methyluridine-3'-phosphate
  modified_base 21: mod_base = OTHER; note = 2'-deoxy-2'-fluorouridine-3'-phosphate ((2S,4R)-1-[29-[[2-(acetylamino)-2-deoxy-beta-D-galactopyra nosyl]oxy]-14,14-bis[[3-[[3-[[5-[[2-(acetylamino)-2-deoxy-b eta-D-galactopyranosyl]oxy]-1-oxopentyl]amino]propyl]amino] -3-oxopropoxy]methyl]-1,12,19,25-tetraoxo-16-oxa-13,20,24-t riazanonacos-1-yl]-4-hydroxy-2-pyrrolidinyl)methyl ester
aggaagtttgcagcttttatt

SEQ ID NO: 138 - RNA, 21 nt, synthetic construct
  source 1..21: mol_type = other RNA
  modified_base 1: mod_base = OTHER; note = 2'-deoxy-2'-fluoroguanosine-3'-phosphate
  modified_base 2: mod_base = OTHER; note = 2'-O-methyladenosine-3'-phosphate
  modified_base 3: mod_base = OTHER; note = 2'-deoxy-2'-fluoroadenosine-3'-phosphate
  modified_base 4: mod_base = OTHER; note = 2'-O-methylguanosine-3'-phosphate
  modified_base 5: mod_base = OTHER; note = 2'-deoxy-2'-fluoroadenosine-3'-phosphate
  modified_base 6: mod_base = OTHER; note = 2'-O-methyladenosine-3'-phosphate
  modified_base 7: mod_base = OTHER; note = 2'-deoxy-2'-fluoroadenosine-3'-phosphate
  modified_base 8: mod_base = OTHER; note = 2'-O-methyluridine-3'-phosphate
  modified_base 9: mod_base = OTHER; note = 2'-deoxy-2'-fluorouridine-3'-phosphate
  modified_base 10: mod_base = OTHER; note = 2'-deoxy-2'-fluoroguanosine-3'-phosphate
  modified_base 11: mod_base = OTHER; note = 2'-deoxy-2'-fluoroadenosine-3'-phosphate
  modified_base 12: mod_base = OTHER; note = 2'-O-methyluridine-3'-phosphate
  modified_base 13: mod_base = OTHER; note = 2'-deoxy-2'-fluorocytidine-3'-phosphate
  modified_base 14: mod_base = OTHER; note = 2'-O-methyladenosine-3'-phosphate
  modified_base 15: mod_base = OTHER; note = 2'-deoxy-2'-fluorouridine-3'-phosphate
  modified_base 16: mod_base = OTHER; note = 2'-O-methyladenosine-3'-phosphate
  modified_base 17: mod_base = OTHER; note = 2'-deoxy-2'-fluorouridine-3'-phosphate
  modified_base 18: mod_base = OTHER; note = 2'-O-methyluridine-3'-phosphate
  modified_base 19: mod_base = OTHER; note = 2'-deoxy-2'-fluoroguanosine-3'-phosphate
  modified_base 20: mod_base = OTHER; note = 2'-O-methylguanosine-3'-phosphate
  modified_base 21: mod_base = OTHER; note = 2'-deoxy-2'-fluoroadenosine-3'-phosphate ((2S,4R)-1-[29-[[2-(acetylamino)-2-deoxy-beta-D-galactopyra nosyl]oxy]-14,14-bis[[3-[[3-[[5-[[2-(acetylamino)-2-deoxy-b eta-D-galactopyranosyl]oxy]-1-oxopentyl]amino]propyl]amino] -3-oxopropoxy]methyl]-1,12,19,25-tetraoxo-16-oxa-13,20,24-t riazanonacos-1-yl]-4-hydroxy-2-pyrrolidinyl)methyl ester
gaagaaattgatcatattgga

SEQ ID NO: 139 - RNA, 21 nt, synthetic construct
  source 1..21: mol_type = other RNA
  modified_base 1: mod_base = OTHER; note = 2'-deoxy-2'-fluoroadenosine-3'-phosphate
  modified_base 2: mod_base = OTHER; note = 2'-O-methyluridine-3'-phosphate
  modified_base 3: mod_base = OTHER; note = 2'-deoxy-2'-fluorocytidine-3'-phosphate
  modified_base 4: mod_base = OTHER; note = 2'-O-methylcytidine-3'-phosphate
  modified_base 5: mod_base = OTHER; note = 2'-deoxy-2'-fluorouridine-3'-phosphate
  modified_base 6: mod_base = OTHER; note = 2'-O-methylguanosine-3'-phosphate
  modified_base 7: mod_base = OTHER; note = 2'-deoxy-2'-fluoroadenosine-3'-phosphate
  modified_base 8: mod_base = OTHER; note = 2'-O-methyluridine-3'-phosphate
  modified_base 9: mod_base = OTHER; note = 2'-deoxy-2'-fluoroadenosine-3'-phosphate
  modified_base 10: mod_base = OTHER; note = 2'-deoxy-2'-fluoroadenosine-3'-phosphate
  modified_base 11: mod_base = OTHER; note = 2'-deoxy-2'-fluoroadenosine-3'-phosphate
  modified_base 12: mod_base = OTHER; note = 2'-O-methyladenosine-3'-phosphate
  modified_base 13: mod_base = OTHER; note = 2'-deoxy-2'-fluoroadenosine-3'-phosphate
  modified_base 14: mod_base = OTHER; note = 2'-O-methyladenosine-3'-phosphate
  modified_base 15: mod_base = OTHER; note = 2'-deoxy-2'-fluorouridine-3'-phosphate
  modified_base 16: mod_base = OTHER; note = 2'-O-methyluridine-3'-phosphate
  modified_base 17: mod_base = OTHER; note = 2'-deoxy-2'-fluorouridine-3'-phosphate
  modified_base 18: mod_base = OTHER; note = 2'-O-methyladenosine-3'-phosphate
  modified_base 19: mod_base = OTHER; note = 2'-deoxy-2'-fluoroguanosine-3'-phosphate
  modified_base 20: mod_base = OTHER; note = 2'-O-methyluridine-3'-phosphate
  modified_base 21: mod_base = OTHER; note = 2'-deoxy-2'-fluorouridine-3'-phosphate ((2S,4R)-1-[29-[[2-(acetylamino)-2-deoxy-beta-D-galactopyra nosyl]oxy]-14,14-bis[[3-[[3-[[5-[[2-(acetylamino)-2-deoxy-b eta-D-galactopyranosyl]oxy]-1-oxopentyl]amino]propyl]amino] -3-oxopropoxy]methyl]-1,12,19,25-tetraoxo-16-oxa-13,20,24-t riazanonacos-1-yl]-4-hydroxy-2-pyrrolidinyl)methyl ester
atcctgataaaaaatttagtt

SEQ ID NO: 140 - RNA, 21 nt, synthetic construct
  source 1..21: mol_type = other RNA
  modified_base 1: mod_base = OTHER; note = 2'-deoxy-2'-fluorouridine-3'-phosphate
  modified_base 2: mod_base = OTHER; note = 2'-O-methylguanosine-3'-phosphate
  modified_base 3: mod_base = OTHER; note = 2'-deoxy-2'-fluoroguanosine-3'-phosphate
  modified_base 4: mod_base = OTHER; note = 2'-O-methyladenosine-3'-phosphate
  modified_base 5: mod_base = OTHER; note = 2'-deoxy-2'-fluoroadenosine-3'-phosphate
  modified_base 6: mod_base = OTHER; note = 2'-O-methyladenosine-3'-phosphate
  modified_base 7: mod_base = OTHER; note = 2'-deoxy-2'-fluoroadenosine-3'-phosphate
  modified_base 8: mod_base = OTHER; note = 2'-O-methylguanosine-3'-phosphate
  modified_base 9: mod_base = OTHER; note = 2'-deoxy-2'-fluoroadenosine-3'-phosphate
  modified_base 10: mod_base = OTHER; note = 2'-deoxy-2'-fluoroadenosine-3'-phosphate
  modified_base 11: mod_base = OTHER; note = 2'-deoxy-2'-fluoroadenosine-3'-phosphate
  modified_base 12: mod_base = OTHER; note = 2'-O-methyluridine-3'-phosphate
  modified_base 13: mod_base = OTHER; note = 2'-deoxy-2'-fluorocytidine-3'-phosphate
  modified_base 14: mod_base = OTHER; note = 2'-O-methyluridine-3'-phosphate
  modified_base 15: mod_base = OTHER; note = 2'-deoxy-2'-fluorouridine-3'-phosphate
  modified_base 16: mod_base = OTHER; note = 2'-O-methyladenosine-3'-phosphate
  modified_base 17: mod_base = OTHER; note = 2'-deoxy-2'-fluoroguanosine-3'-phosphate
  modified_base 18: mod_base = OTHER; note = 2'-O-methyluridine-3'-phosphate
  modified_base 19: mod_base = OTHER; note = 2'-deoxy-2'-fluoroadenosine-3'-phosphate
  modified_base 20: mod_base = OTHER; note = 2'-O-methyladenosine-3'-phosphate
  modified_base 21: mod_base = OTHER; note = 2'-deoxy-2'-fluoroadenosine-3'-phosphate ((2S,4R)-1-[29-[[2-(acetylamino)-2-deoxy-beta-D-galactopyra nosyl]oxy]-14,14-bis[[3-[[3-[[5-[[2-(acetylamino)-2-deoxy-b eta-D-galactopyranosyl]oxy]-1-oxopentyl]amino]propyl]amino] -3-oxopropoxy]methyl]-1,12,19,25-tetraoxo-16-oxa-13,20,24-t riazanonacos-1-yl]-4-hydroxy-2-pyrrolidinyl)methyl ester
tggaaaagaaatcttagtaaa

SEQ ID NO: 141 - RNA, 21 nt, synthetic construct
  source 1..21: mol_type = other RNA
  modified_base 1: mod_base = OTHER; note = 2'-deoxy-2'-fluorouridine-3'-phosphate
  modified_base 2: mod_base = OTHER; note = 2'-O-methylcytidine-3'-phosphate
  modified_base 3: mod_base = OTHER; note = 2'-deoxy-2'-fluorouridine-3'-phosphate
  modified_base 4: mod_base = OTHER; note = 2'-O-methyluridine-3'-phosphate
  modified_base 5: mod_base = OTHER; note = 2'-deoxy-2'-fluoroadenosine-3'-phosphate
  modified_base 6: mod_base = OTHER; note = 2'-O-methyluridine-3'-phosphate
  modified_base 7: mod_base = OTHER; note = 2'-deoxy-2'-fluorocytidine-3'-phosphate
  modified_base 8: mod_base = OTHER; note = 2'-O-methyladenosine-3'-phosphate
  modified_base 9: mod_base = OTHER; note = 2'-deoxy-2'-fluoroadenosine-3'-phosphate
  modified_base 10: mod_base = OTHER; note = 2'-deoxy-2'-fluoroadenosine-3'-phosphate
  modified_base 11: mod_base = OTHER; note = 2'-deoxy-2'-fluoroguanosine-3'-phosphate
  modified_base 12: mod_base = OTHER; note = 2'-O-methyluridine-3'-phosphate
  modified_base 13: mod_base = OTHER; note = 2'-deoxy-2'-fluoroadenosine-3'-phosphate
  modified_base 14: mod_base = OTHER; note = 2'-O-methyluridine-3'-phosphate
  modified_base 15: mod_base = OTHER; note = 2'-deoxy-2'-fluoroadenosine-3'-phosphate
  modified_base 16: mod_base = OTHER; note = 2'-O-methyladenosine-3'-phosphate
  modified_base 17: mod_base = OTHER; note = 2'-deoxy-2'-fluoroadenosine-3'-phosphate
  modified_base 18: mod_base = OTHER; note = 2'-O-methylcytidine-3'-phosphate
  modified_base 19: mod_base = OTHER; note = 2'-deoxy-2'-fluoroadenosine-3'-phosphate
  modified_base 20: mod_base = OTHER; note = 2'-O-methyluridine-3'-phosphate
  modified_base 21: mod_base = OTHER; note = 2'-deoxy-2'-fluorouridine-3'-phosphate ((2S,4R)-1-[29-[[2-(acetylamino)-2-deoxy-beta-D-galactopyra nosyl]oxy]-14,14-bis[[3-[[3-[[5-[[2-(acetylamino)-2-deoxy-b eta-D-galactopyranosyl]oxy]-1-oxopentyl]amino]propyl]amino] -3-oxopropoxy]methyl]-1,12,19,25-tetraoxo-16-oxa-13,20,24-t riazanonacos-1-yl]-4-hydroxy-2-pyrrolidinyl)methyl ester
tcttatcaaagtataaacatt

SEQ ID NO: 142 - RNA, 21 nt, synthetic construct
  source 1..21: mol_type = other RNA
  modified_base 1: mod_base = OTHER; note = 2'-deoxy-2'-fluorouridine-3'-phosphate
  modified_base 2: mod_base = OTHER; note = 2'-O-methylcytidine-3'-phosphate
  modified_base 3: mod_base = OTHER; note = 2'-deoxy-2'-fluorocytidine-3'-phosphate
  modified_base 4: mod_base = OTHER; note = 2'-O-methylcytidine-3'-phosphate
  modified_base 5: mod_base = OTHER; note = 2'-deoxy-2'-fluorouridine-3'-phosphate
  modified_base 6: mod_base = OTHER; note = 2'-O-methyladenosine-3'-phosphate
  modified_base 7: mod_base = OTHER; note = 2'-deoxy-2'-fluorocytidine-3'-phosphate
  modified_base 8: mod_base = OTHER; note = 2'-O-methyladenosine-3'-phosphate
  modified_base 9: mod_base = OTHER; note = 2'-deoxy-2'-fluoroadenosine-3'-phosphate
  modified_base 10: mod_base = OTHER; note = 2'-deoxy-2'-fluoroadenosine-3'-phosphate
  modified_base 11: mod_base = OTHER; note = 2'-deoxy-2'-fluorocytidine-3'-phosphate
  modified_base 12: mod_base = OTHER; note = 2'-O-methyluridine-3'-phosphate
  modified_base 13: mod_base = OTHER; note = 2'-deoxy-2'-fluoroguanosine-3'-phosphate
  modified_base 14: mod_base = OTHER; note = 2'-O-methyladenosine-3'-phosphate
  modified_base 15: mod_base = OTHER; note = 2'-deoxy-2'-fluoroadenosine-3'-phosphate
  modified_base 16: mod_base = OTHER; note = 2'-O-methyluridine-3'-phosphate
  modified_base 17: mod_base = OTHER; note = 2'-deoxy-2'-fluorouridine-3'-phosphate
  modified_base 18: mod_base = OTHER; note = 2'-O-methyluridine-3'-phosphate
  modified_base 19: mod_base = OTHER; note = 2'-deoxy-2'-fluoroguanosine-3'-phosphate
  modified_base 20: mod_base = OTHER; note = 2'-O-methylguanosine-3'-phosphate
  modified_base 21: mod_base = OTHER; note = 2'-deoxy-2'-fluorouridine-3'-phosphate ((2S,4R)-1-[29-[[2-(acetylamino)-2-deoxy-beta-D-galactopyra nosyl]oxy]-14,14-bis[[3-[[3-[[5-[[2-(acetylamino)-2-deoxy-b eta-D-galactopyranosyl]oxy]-1-oxopentyl]amino]propyl]amino] -3-oxopropoxy]methyl]-1,12,19,25-tetraoxo-16-oxa-13,20,24-t riazanonacos-1-yl]-4-hydroxy-2-pyrrolidinyl)methyl ester
tccctacaaactgaatttggt

SEQ ID NO: 143 - RNA, 21 nt, synthetic construct
  source 1..21: mol_type = other RNA
  modified_base 1: mod_base = OTHER; note = 2'-deoxy-2'-fluorocytidine-3'-phosphate
  modified_base 2: mod_base = OTHER; note = 2'-O-methyladenosine-3'-phosphate
  modified_base 3: mod_base = OTHER; note = 2'-deoxy-2'-fluoroguanosine-3'-phosphate
  modified_base 4: mod_base = OTHER; note = 2'-O-methylguanosine-3'-phosphate
  modified_base 5: mod_base = OTHER; note = 2'-deoxy-2'-fluoroadenosine-3'-phosphate
  modified_base 6: mod_base = OTHER; note = 2'-O-methylguanosine-3'-phosphate
  modified_base 7: mod_base = OTHER; note = 2'-deoxy-2'-fluorocytidine-3'-phosphate
  modified_base 8: mod_base = OTHER; note = 2'-O-methyladenosine-3'-phosphate
  modified_base 9: mod_base = OTHER; note = 2'-deoxy-2'-fluoroadenosine-3'-phosphate
  modified_base 10: mod_base = OTHER; note = 2'-deoxy-2'-fluoroadenosine-3'-phosphate
  modified_base 11: mod_base = OTHER; note = 2'-deoxy-2'-fluorocytidine-3'-phosphate
  modified_base 12: mod_base = OTHER; note = 2'-O-methyladenosine-3'-phosphate
  modified_base 13: mod_base = OTHER; note = 2'-deoxy-2'-fluorouridine-3'-phosphate
  modified_base 14: mod_base = OTHER; note = 2'-O-methyladenosine-3'-phosphate
  modified_base 15: mod_base = OTHER; note = 2'-deoxy-2'-fluorouridine-3'-phosphate
  modified_base 16: mod_base = OTHER; note = 2'-O-methylguanosine-3'-phosphate
  modified_base 17: mod_base = OTHER; note = 2'-deoxy-2'-fluorouridine-3'-phosphate
  modified_base 18: mod_base = OTHER; note = 2'-O-methylcytidine-3'-phosphate
  modified_base 19: mod_base = OTHER; note = 2'-deoxy-2'-fluoroadenosine-3'-phosphate
  modified_base 20: mod_base = OTHER; note = 2'-O-methyluridine-3'-phosphate
  modified_base 21: mod_base = OTHER; note = 2'-deoxy-2'-fluorouridine-3'-phosphate ((2S,4R)-1-[29-[[2-(acetylamino)-2-deoxy-beta-D-galactopyra nosyl]oxy]-14,14-bis[[3-[[3-[[5-[[2-(acetylamino)-2-deoxy-b eta-D-galactopyranosyl]oxy]-1-oxopentyl]amino]propyl]amino] -3-oxopropoxy]methyl]-1,12,19,25-tetraoxo-16-oxa-13,20,24-t riazanonacos-1-yl]-4-hydroxy-2-pyrrolidinyl)methyl ester
caggagcaaacatatgtcatt

SEQ ID NO: 144 - RNA, 21 nt, synthetic construct
  source 1..21: mol_type = other RNA
  modified_base 1: mod_base = OTHER; note = 2'-deoxy-2'-fluoroadenosine-3'-phosphate
  modified_base 2: mod_base = OTHER; note = 2'-O-methylcytidine-3'-phosphate
  modified_base 3: mod_base = OTHER; note = 2'-deoxy-2'-fluoroadenosine-3'-phosphate
  modified_base 4: mod_base = OTHER; note = 2'-O-methyluridine-3'-phosphate
  modified_base 5: mod_base = OTHER; note = 2'-deoxy-2'-fluoroguanosine-3'-phosphate
  modified_base 6: mod_base = OTHER; note = 2'-O-methyluridine-3'-phosphate
  modified_base 7: mod_base = OTHER; note = 2'-deoxy-2'-fluoroadenosine-3'-phosphate
  modified_base 8: mod_base = OTHER; note = 2'-O-methyladenosine-3'-phosphate
  modified_base 9: mod_base = OTHER; note = 2'-deoxy-2'-fluorocytidine-3'-phosphate
  modified_base 10: mod_base = OTHER; note = 2'-deoxy-2'-fluoroadenosine-3'-phosphate
  modified_base 11: mod_base = OTHER; note = 2'-deoxy-2'-fluoroadenosine-3'-phosphate
  modified_base 12: mod_base = OTHER; note = 2'-O-methylcytidine-3'-phosphate
  modified_base 13: mod_base = OTHER; note = 2'-deoxy-2'-fluorouridine-3'-phosphate
  modified_base 14: mod_base = OTHER; note = 2'-O-methylguanosine-3'-phosphate
  modified_base 15: mod_base = OTHER; note = 2'-deoxy-2'-fluorouridine-3'-phosphate
  modified_base 16: mod_base = OTHER; note = 2'-O-methyladenosine-3'-phosphate
  modified_base 17: mod_base = OTHER; note = 2'-deoxy-2'-fluoroguanosine-3'-phosphate
  modified_base 18: mod_base = OTHER; note = 2'-O-methyluridine-3'-phosphate
  modified_base 19: mod_base = OTHER; note = 2'-deoxy-2'-fluorouridine-3'-phosphate
  modified_base 20: mod_base = OTHER; note = 2'-O-methylcytidine-3'-phosphate
  modified_base 21: mod_base = OTHER; note = 2'-deoxy-2'-fluoroadenosine-3'-phosphate ((2S,4R)-1-[29-[[2-(acetylamino)-2-deoxy-beta-D-galactopyra nosyl]oxy]-14,14-bis[[3-[[3-[[5-[[2-(acetylamino)-2-deoxy-b eta-D-galactopyranosyl]oxy]-1-oxopentyl]amino]propyl]amino] -3-oxopropoxy]methyl]-1,12,19,25-tetraoxo-16-oxa-13,20,24-t riazanonacos-1-yl]-4-hydroxy-2-pyrrolidinyl)methyl ester
acatgtaacaactgtagttca

SEQ ID NO: 145 - RNA, 21 nt, synthetic construct
  source 1..21: mol_type = other RNA
  modified_base 1: mod_base = OTHER; note = 2'-deoxy-2'-fluorocytidine-3'-phosphate
  modified_base 2: mod_base = OTHER; note = 2'-O-methyladenosine-3'-phosphate
  modified_base 3: mod_base = OTHER; note = 2'-deoxy-2'-fluoroguanosine-3'-phosphate
  modified_base 4: mod_base = OTHER; note = 2'-O-methylguanosine-3'-phosphate
  modified_base 5: mod_base = OTHER; note = 2'-deoxy-2'-fluoroadenosine-3'-phosphate
  modified_base 6: mod_base = OTHER; note = 2'-O-methyladenosine-3'-phosphate
  modified_base 7: mod_base = OTHER; note = 2'-deoxy-2'-fluoroadenosine-3'-phosphate
  modified_base 8: mod_base = OTHER; note = 2'-O-methyluridine-3'-phosphate
  modified_base 9: mod_base = OTHER; note = 2'-deoxy-2'-fluorocytidine-3'-phosphate
  modified_base 10: mod_base = OTHER; note = 2'-deoxy-2'-fluoroadenosine-3'-phosphate
  modified_base 11: mod_base = OTHER; note = 2'-deoxy-2'-fluorouridine-3'-phosphate
  modified_base 12: mod_base = OTHER; note = 2'-O-methyluridine-3'-phosphate
  modified_base 13: mod_base = OTHER; note = 2'-deoxy-2'-fluoroguanosine-3'-phosphate
  modified_base 14: mod_base = OTHER; note = 2'-O-methylguanosine-3'-phosphate
  modified_base 15: mod_base = OTHER; note = 2'-deoxy-2'-fluoroadenosine-3'-phosphate
  modified_base 16: mod_base = OTHER; note = 2'-O-methyladenosine-3'-phosphate
  modified_base 17: mod_base = OTHER; note = 2'-deoxy-2'-fluorocytidine-3'-phosphate
  modified_base 18: mod_base = OTHER; note = 2'-O-methyladenosine-3'-phosphate
  modified_base 19: mod_base = OTHER; note = 2'-deoxy-2'-fluorouridine-3'-phosphate
  modified_base 20: mod_base = OTHER; note = 2'-O-methyluridine-3'-phosphate
  modified_base 21: mod_base = OTHER; note = 2'-deoxy-2'-fluorouridine-3'-phosphate ((2S,4R)-1-[29-[[2-(acetylamino)-2-deoxy-beta-D-galactopyra nosyl]oxy]-14,14-bis[[3-[[3-[[5-[[2-(acetylamino)-2-deoxy-b eta-D-galactopyranosyl]oxy]-1-oxopentyl]amino]propyl]amino] -3-oxopropoxy]methyl]-1,12,19,25-tetraoxo-16-oxa-13,20,24-t riazanonacos-1-yl]-4-hydroxy-2-pyrrolidinyl)methyl ester
caggaaatcattggaacattt

SEQ ID NO: 146 - RNA, 21 nt, synthetic construct
  source 1..21: mol_type = other RNA
  modified_base 1: mod_base = OTHER; note = 2'-deoxy-2'-fluorouridine-3'-phosphate
  modified_base 2: mod_base = OTHER; note = 2'-O-methyluridine-3'-phosphate
  modified_base 3: mod_base = OTHER; note = 2'-deoxy-2'-fluorouridine-3'-phosphate
  modified_base 4: mod_base = OTHER; note = 2'-O-methyladenosine-3'-phosphate
  modified_base 5: mod_base = OTHER; note = 2'-deoxy-2'-fluoroadenosine-3'-phosphate
  modified_base 6: mod_base = OTHER; note = 2'-O-methylguanosine-3'-phosphate
  modified_base 7: mod_base = OTHER; note = 2'-deoxy-2'-fluoroadenosine-3'-phosphate
  modified_base 8: mod_base = OTHER; note = 2'-O-methyladenosine-3'-phosphate
  modified_base 9: mod_base = OTHER; note = 2'-deoxy-2'-fluorouridine-3'-phosphate
  modified_base 10: mod_base = OTHER; note = 2'-deoxy-2'-fluorouridine-3'-phosphate
  modified_base 11: mod_base = OTHER; note = 2'-deoxy-2'-fluorouridine-3'-phosphate
  modified_base 12: mod_base = OTHER; note = 2'-O-methyluridine-3'-phosphate
  modified_base 13: mod_base = OTHER; note = 2'-deoxy-2'-fluoroguanosine-3'-phosphate
  modified_base 14: mod_base = OTHER; note = 2'-O-methyladenosine-3'-phosphate
  modified_base 15: mod_base = OTHER; note = 2'-deoxy-2'-fluoroadenosine-3'-phosphate
  modified_base 16: mod_base = OTHER; note = 2'-O-methyladenosine-3'-phosphate
  modified_base 17: mod_base = OTHER; note = 2'-deoxy-2'-fluorouridine-3'-phosphate
  modified_base 18: mod_base = OTHER; note = 2'-O-methyluridine-3'-phosphate
  modified_base 19: mod_base = OTHER; note = 2'-deoxy-2'-fluoroadenosine-3'-phosphate
  modified_base 20: mod_base = OTHER; note = 2'-O-methylcytidine-3'-phosphate
  modified_base 21: mod_base = OTHER; note = 2'-deoxy-2'-fluorouridine-3'-phosphate ((2S,4R)-1-[29-[[2-(acetylamino)-2-deoxy-beta-D-galactopyra nosyl]oxy]-14,14-bis[[3-[[3-[[5-[[2-(acetylamino)-2-deoxy-b eta-D-galactopyranosyl]oxy]-1-oxopentyl]amino]propyl]amino] -3-oxopropoxy]methyl]-1,12,19,25-tetraoxo-16-oxa-13,20,24-t riazanonacos-1-yl]-4-hydroxy-2-pyrrolidinyl)methyl ester
tttaagaattttgaaattact

SEQ ID NO: 147 - RNA, 21 nt, synthetic construct
  source 1..21: mol_type = other RNA
  modified_base 1: mod_base = OTHER; note = 2'-deoxy-2'-fluorouridine-3'-phosphate
  modified_base 2: mod_base = OTHER; note = 2'-O-methyladenosine-3'-phosphate
  modified_base 3: mod_base = OTHER; note = 2'-deoxy-2'-fluorouridine-3'-phosphate
  modified_base 4: mod_base = OTHER; note = 2'-O-methyluridine-3'-phosphate
  modified_base 5: mod_base = OTHER; note = 2'-deoxy-2'-fluorocytidine-3'-phosphate
  modified_base 6: mod_base = OTHER; note = 2'-O-methyluridine-3'-phosphate
  modified_base 7: mod_base = OTHER; note = 2'-deoxy-2'-fluoroguanosine-3'-phosphate
  modified_base 8: mod_base = OTHER; note = 2'-O-methylcytidine-3'-phosphate
  modified_base 9: mod_base = OTHER; note = 2'-deoxy-2'-fluoroadenosine-3'-phosphate
  modified_base 10: mod_base = OTHER; note = 2'-deoxy-2'-fluoroadenosine-3'-phosphate
  modified_base 11: mod_base = OTHER; note = 2'-deoxy-2'-fluorocytidine-3'-phosphate
  modified_base 12: mod_base = OTHER; note = 2'-O-methyluridine-3'-phosphate
  modified_base 13: mod_base = OTHER; note = 2'-deoxy-2'-fluoroguanosine-3'-phosphate
  modified_base 14: mod_base = OTHER; note = 2'-O-methyladenosine-3'-phosphate
  modified_base 15: mod_base = OTHER; note = 2'-deoxy-2'-fluoroadenosine-3'-phosphate
  modified_base 16: mod_base = OTHER; note = 2'-O-methyluridine-3'-phosphate
  modified_base 17: mod_base = OTHER; note = 2'-deoxy-2'-fluorouridine-3'-phosphate
  modified_base 18: mod_base = OTHER; note = 2'-O-methylcytidine-3'-phosphate
  modified_base 19: mod_base = OTHER; note = 2'-deoxy-2'-fluoroguanosine-3'-phosphate
  modified_base 20: mod_base = OTHER; note = 2'-O-methyladenosine-3'-phosphate
  modified_base 21: mod_base = OTHER; note = 2'-deoxy-2'-fluorouridine-3'-phosphate ((2S,4R)-1-[29-[[2-(acetylamino)-2-deoxy-beta-D-galactopyra nosyl]oxy]-14,14-bis[[3-[[3-[[5-[[2-(acetylamino)-2-deoxy-b eta-D-galactopyranosyl]oxy]-1-oxopentyl]amino]propyl]amino] -3-oxopropoxy]methyl]-1,12,19,25-tetraoxo-16-oxa-13,20,24-t riazanonacos-1-yl]-4-hydroxy-2-pyrrolidinyl)methyl ester
tattctgcaactgaattcgat

SEQ ID NO: 148 - RNA, 21 nt, synthetic construct
  source 1..21: mol_type = other RNA
  modified_base 1: mod_base = OTHER; note = 2'-deoxy-2'-fluoroguanosine-3'-phosphate
  modified_base 2: mod_base = OTHER; note = 2'-O-methylcytidine-3'-phosphate
  modified_base 3: mod_base = OTHER; note = 2'-deoxy-2'-fluorocytidine-3'-phosphate
  modified_base 4: mod_base = OTHER; note = 2'-O-methylcytidine-3'-phosphate
  modified_base 5: mod_base = OTHER; note = 2'-deoxy-2'-fluorouridine-3'-phosphate
  modified_base 6: mod_base = OTHER; note = 2'-O-methyluridine-3'-phosphate
  modified_base 7: mod_base = OTHER; note = 2'-deoxy-2'-fluoroguanosine-3'-phosphate
  modified_base 8: mod_base = OTHER; note = 2'-O-methylguanosine-3'-phosphate
  modified_base 9: mod_base = OTHER; note = 2'-deoxy-2'-fluoroadenosine-3'-phosphate
  modified_base 10: mod_base = OTHER; note = 2'-deoxy-2'-fluoroadenosine-3'-phosphate
  modified_base 11: mod_base = OTHER; note = 2'-deoxy-2'-fluoroadenosine-3'-phosphate
  modified_base 12: mod_base = OTHER; note = 2'-O-methylguanosine-3'-phosphate
  modified_base 13: mod_base = OTHER; note = 2'-deoxy-2'-fluoroadenosine-3'-phosphate
  modified_base 14: mod_base = OTHER; note = 2'-O-methylguanosine-3'-phosphate
  modified_base 15: mod_base = OTHER; note = 2'-deoxy-2'-fluorouridine-3'-phosphate
  modified_base 16: mod_base = OTHER; note = 2'-O-methyladenosine-3'-phosphate
  modified_base 17: mod_base = OTHER; note = 2'-deoxy-2'-fluorouridine-3'-phosphate
  modified_base 18: mod_base = OTHER; note = 2'-O-methyluridine-3'-phosphate
  modified_base 19: mod_base = OTHER; note = 2'-deoxy-2'-fluorouridine-3'-phosphate
  modified_base 20: mod_base = OTHER; note = 2'-O-methylcytidine-3'-phosphate
  modified_base 21: mod_base = OTHER; note = 2'-deoxy-2'-fluoroadenosine-3'-phosphate ((2S,4R)-1-[29-[[2-(acetylamino)-2-deoxy-beta-D-galactopyra nosyl]oxy]-14,14-bis[[3-[[3-[[5-[[2-(acetylamino)-2-deoxy-b eta-D-galactopyranosyl]oxy]-1-oxopentyl]amino]propyl]amino] -3-oxopropoxy]methyl]-1,12,19,25-tetraoxo-16-oxa-13,20,24-t riazanonacos-1-yl]-4-hydroxy-2-pyrrolidinyl)methyl ester
gcccttggaaagagtatttca

SEQ ID NO: 149 - RNA, 21 nt, synthetic construct
  source 1..21: mol_type = other RNA
  modified_base 1: mod_base = OTHER; note = 2'-deoxy-2'-fluorocytidine-3'-phosphate
  modified_base 2: mod_base = OTHER; note = 2'-O-methylcytidine-3'-phosphate
  modified_base 3: mod_base = OTHER; note = 2'-deoxy-2'-fluorouridine-3'-phosphate
  modified_base 4: mod_base = OTHER; note = 2'-O-methylguanosine-3'-phosphate
  modified_base 5: mod_base = OTHER; note = 2'-deoxy-2'-fluoroadenosine-3'-phosphate
  modified_base 6: mod_base = OTHER; note = 2'-O-methyluridine-3'-phosphate
  modified_base 7: mod_base = OTHER; note = 2'-deoxy-2'-fluoroadenosine-3'-phosphate
  modified_base 8: mod_base = OTHER; note = 2'-O-methyladenosine-3'-phosphate
  modified_base 9: mod_base = OTHER; note = 2'-deoxy-2'-fluoroadenosine-3'-phosphate
  modified_base 10: mod_base = OTHER; note = 2'-deoxy-2'-fluoroadenosine-3'-phosphate
  modified_base 11: mod_base = OTHER; note = 2'-deoxy-2'-fluoroadenosine-3'-phosphate
  modified_base 12: mod_base = OTHER; note = 2'-O-methyladenosine-3'-phosphate
  modified_base 13: mod_base = OTHER; note = 2'-deoxy-2'-fluorouridine-3'-phosphate
  modified_base 14: mod_base = OTHER; note = 2'-O-methyluridine-3'-phosphate
  modified_base 15: mod_base = OTHER; note = 2'-deoxy-2'-fluorouridine-3'-phosphate
  modified_base 16: mod_base = OTHER; note = 2'-O-methyladenosine-3'-phosphate
  modified_base 17: mod_base = OTHER; note = 2'-deoxy-2'-fluoroguanosine-3'-phosphate
  modified_base 18: mod_base = OTHER; note = 2'-O-methyluridine-3'-phosphate
  modified_base 19: mod_base = OTHER; note = 2'-deoxy-2'-fluorouridine-3'-phosphate
  modified_base 20: mod_base = OTHER; note = 2'-O-methyladenosine-3'-phosphate
  modified_base 21: mod_base = OTHER; note = 2'-deoxy-2'-fluorocytidine-3'-phosphate ((2S,4R)-1-[29-[[2-(acetylamino)-2-deoxy-beta-D-galactopyra nosyl]oxy]-14,14-bis[[3-[[3-[[5-[[2-(acetylamino)-2-deoxy-b eta-D-galactopyranosyl]oxy]-1-oxopentyl]amino]propyl]amino] -3-oxopropoxy]methyl]-1,12,19,25-tetraoxo-16-oxa-13,20,24-t riazanonacos-1-yl]-4-hydroxy-2-pyrrolidinyl)methyl ester
cctgataaaaaatttagttac

SEQ ID NO: 150 - RNA, 21 nt, synthetic construct
  source 1..21: mol_type = other RNA
  modified_base 1: mod_base = OTHER; note = 2'-deoxy-2'-fluorocytidine-3'-phosphate
  modified_base 2: mod_base = OTHER; note = 2'-O-methylcytidine-3'-phosphate
  modified_base 3: mod_base = OTHER; note = 2'-deoxy-2'-fluorocytidine-3'-phosphate
  modified_base 4: mod_base = OTHER; note = 2'-O-methyluridine-3'-phosphate
  modified_base 5: mod_base = OTHER; note = 2'-deoxy-2'-fluorouridine-3'-phosphate
  modified_base 6: mod_base = OTHER; note = 2'-O-methylguanosine-3'-phosphate
  modified_base 7: mod_base = OTHER; note = 2'-deoxy-2'-fluoroguanosine-3'-phosphate
  modified_base 8: mod_base = OTHER; note = 2'-O-methyladenosine-3'-phosphate
  modified_base 9: mod_base = OTHER; note = 2'-deoxy-2'-fluoroadenosine-3'-phosphate
  modified_base 10: mod_base = OTHER; note = 2'-deoxy-2'-fluoroadenosine-3'-phosphate
  modified_base 11: mod_base = OTHER; note = 2'-deoxy-2'-fluoroguanosine-3'-phosphate
  modified_base 12: mod_base = OTHER; note = 2'-O-methyladenosine-3'-phosphate
  modified_base 13: mod_base = OTHER; note = 2'-deoxy-2'-fluoroguanosine-3'-phosphate
  modified_base 14: mod_base = OTHER; note = 2'-O-methyluridine-3'-phosphate
  modified_base 15: mod_base = OTHER; note = 2'-deoxy-2'-fluoroadenosine-3'-phosphate
  modified_base 16: mod_base = OTHER; note = 2'-O-methyluridine-3'-phosphate
  modified_base 17: mod_base = OTHER; note = 2'-deoxy-2'-fluorouridine-3'-phosphate
  modified_base 18: mod_base = OTHER; note = 2'-O-methyluridine-3'-phosphate
  modified_base 19: mod_base = OTHER; note = 2'-deoxy-2'-fluorocytidine-3'-phosphate
  modified_base 20: mod_base = OTHER; note = 2'-O-methyladenosine-3'-phosphate
  modified_base 21: mod_base = OTHER; note = 2'-deoxy-2'-fluoroadenosine-3'-phosphate ((2S,4R)-1-[29-[[2-(acetylamino)-2-deoxy-beta-D-galactopyra nosyl]oxy]-14,14-bis[[3-[[3-[[5-[[2-(acetylamino)-2-deoxy-b eta-D-galactopyranosyl]oxy]-1-oxopentyl]amino]propyl]amino] -3-oxopropoxy]methyl]-1,12,19,25-tetraoxo-16-oxa-13,20,24-t riazanonacos-1-yl]-4-hydroxy-2-pyrrolidinyl)methyl ester
cccttggaaagagtatttcaa

SEQ ID NO: 151 - RNA, 21 nt, synthetic construct
  source 1..21: mol_type = other RNA
  modified_base 1: mod_base = OTHER; note = 2'-deoxy-2'-fluorouridine-3'-phosphate
  modified_base 2: mod_base = OTHER; note = 2'-O-methylguanosine-3'-phosphate
  modified_base 3: mod_base = OTHER; note = 2'-deoxy-2'-fluorocytidine-3'-phosphate
  modified_base 4: mod_base = OTHER; note = 2'-O-methyladenosine-3'-phosphate
  modified_base 5: mod_base = OTHER; note = 2'-deoxy-2'-fluoroguanosine-3'-phosphate
  modified_base 6: mod_base = OTHER; note = 2'-O-methyladenosine-3'-phosphate
  modified_base 7: mod_base = OTHER; note = 2'-deoxy-2'-fluorouridine-3'-phosphate
  modified_base 8: mod_base = OTHER; note = 2'-O-methylcytidine-3'-phosphate
  modified_base 9: mod_base = OTHER; note = 2'-deoxy-2'-fluoroadenosine-3'-phosphate
  modified_base 10: mod_base = OTHER; note = 2'-deoxy-2'-fluoroadenosine-3'-phosphate
  modified_base 11: mod_base = OTHER; note = 2'-deoxy-2'-fluoroadenosine-3'-phosphate
  modified_base 12: mod_base = OTHER; note = 2'-O-methylcytidine-3'-phosphate
  modified_base 13: mod_base = OTHER; note = 2'-deoxy-2'-fluoroadenosine-3'-phosphate
  modified_base 14: mod_base = OTHER; note = 2'-O-methylcytidine-3'-phosphate
  modified_base 15: mod_base = OTHER; note = 2'-deoxy-2'-fluoroadenosine-3'-phosphate
  modified_base 16: mod_base = OTHER; note = 2'-O-methyladenosine-3'-phosphate
  modified_base 17: mod_base = OTHER; note = 2'-deoxy-2'-fluorouridine-3'-phosphate
  modified_base 18: mod_base = OTHER; note = 2'-O-methyluridine-3'-phosphate
  modified_base 19: mod_base = OTHER; note = 2'-deoxy-2'-fluorouridine-3'-phosphate
  modified_base 20: mod_base = OTHER; note = 2'-O-methylcytidine-3'-phosphate
  modified_base 21: mod_base = OTHER; note = 2'-deoxy-2'-fluoroadenosine-3'-phosphate ((2S,4R)-1-[29-[[2-(acetylamino)-2-deoxy-beta-D-galactopyra nosyl]oxy]-14,14-bis[[3-[[3-[[5-[[2-(acetylamino)-2-deoxy-b eta-D-galactopyranosyl]oxy]-1-oxopentyl]amino]propyl]amino] -3-oxopropoxy]methyl]-1,12,19,25-tetraoxo-16-oxa-13,20,24-t riazanonacos-1-yl]-4-hydroxy-2-pyrrolidinyl)methyl ester
tgcagatcaaacacaatttca

SEQ ID NO: 152 - RNA, 21 nt, synthetic construct
  source 1..21: mol_type = other RNA
  modified_base 1: mod_base = OTHER; note = 2'-deoxy-2'-fluorocytidine-3'-phosphate
  modified_base 2: mod_base = OTHER; note = 2'-O-methyladenosine-3'-phosphate
  modified_base 3: mod_base = OTHER; note = 2'-deoxy-2'-fluoroguanosine-3'-phosphate
  modified_base 4: mod_base = OTHER; note = 2'-O-methyladenosine-3'-phosphate
  modified_base 5: mod_base = OTHER; note = 2'-deoxy-2'-fluorouridine-3'-phosphate
  modified_base 6: mod_base = OTHER; note = 2'-O-methylcytidine-3'-phosphate
  modified_base 7: mod_base = OTHER; note = 2'-deoxy-2'-fluoroadenosine-3'-phosphate
  modified_base 8: mod_base = OTHER; note = 2'-O-methyladenosine-3'-phosphate
  modified_base 9: mod_base = OTHER; note = 2'-deoxy-2'-fluoroadenosine-3'-phosphate
  modified_base 10: mod_base = OTHER; note = 2'-deoxy-2'-fluorocytidine-3'-phosphate
  modified_base 11: mod_base = OTHER; note = 2'-deoxy-2'-fluoroadenosine-3'-phosphate
  modified_base 12: mod_base = OTHER; note = 2'-O-methylcytidine-3'-phosphate
  modified_base 13: mod_base = OTHER; note = 2'-deoxy-2'-fluoroadenosine-3'-phosphate
  modified_base 14: mod_base = OTHER; note = 2'-O-methyladenosine-3'-phosphate
  modified_base 15: mod_base = OTHER; note = 2'-deoxy-2'-fluorouridine-3'-phosphate
  modified_base 16: mod_base = OTHER; note = 2'-O-methyluridine-3'-phosphate
  modified_base 17: mod_base = OTHER; note = 2'-deoxy-2'-fluorouridine-3'-phosphate
  modified_base 18: mod_base = OTHER; note = 2'-O-methylcytidine-3'-phosphate
  modified_base 19: mod_base = OTHER; note = 2'-deoxy-2'-fluoroadenosine-3'-phosphate
  modified_base 20: mod_base = OTHER; note = 2'-O-methylguanosine-3'-phosphate
  modified_base 21: mod_base = OTHER; note = 2'-deoxy-2'-fluorouridine-3'-phosphate ((2S,4R)-1-[29-[[2-(acetylamino)-2-deoxy-beta-D-galactopyra nosyl]oxy]-14,14-bis[[3-[[3-[[5-[[2-(acetylamino)-2-deoxy-b eta-D-galactopyranosyl]oxy]-1-oxopentyl]amino]propyl]amino] -3-oxopropoxy]methyl]-1,12,19,25-tetraoxo-16-oxa-13,20,24-t riazanonacos-1-yl]-4-hydroxy-2-pyrrolidinyl)methyl ester
cagatcaaacacaatttcagt

SEQ ID NO: 153 - RNA, 21 nt, synthetic construct
  source 1..21: mol_type = other RNA
  modified_base 1: mod_base = OTHER; note = 2'-deoxy-2'-fluoroguanosine-3'-phosphate
  modified_base 2: mod_base = OTHER; note = 2'-O-methyluridine-3'-phosphate
  modified_base 3: mod_base = OTHER; note = 2'-deoxy-2'-fluorouridine-3'-phosphate
  modified_base 4: mod_base = OTHER; note = 2'-O-methylcytidine-3'-phosphate
  modified_base 5: mod_base = OTHER; note = 2'-deoxy-2'-fluorocytidine-3'-phosphate
  modified_base 6: mod_base = OTHER; note = 2'-O-methylguanosine-3'-phosphate
  modified_base 7: mod_base = OTHER; note = 2'-deoxy-2'-fluoroguanosine-3'-phosphate
  modified_base 8: mod_base = OTHER; note = 2'-O-methyladenosine-3'-phosphate
  modified_base 9: mod_base = OTHER; note = 2'-deoxy-2'-fluorouridine-3'-phosphate
  modified_base 10: mod_base = OTHER; note = 2'-deoxy-2'-fluoroadenosine-3'-phosphate
  modified_base 11: mod_base = OTHER; note = 2'-deoxy-2'-fluorouridine-3'-phosphate
  modified_base 12: mod_base = OTHER; note = 2'-O-methyluridine-3'-phosphate
  modified_base 13: mod_base = OTHER; note = 2'-deoxy-2'-fluorouridine-3'-phosphate
  modified_base 14: mod_base = OTHER; note = 2'-O-methylguanosine-3'-phosphate
  modified_base 15: mod_base = OTHER; note = 2'-deoxy-2'-fluoroadenosine-3'-phosphate
  modified_base 16: mod_base = OTHER; note = 2'-O-methyladenosine-3'-phosphate
  modified_base 17: mod_base = OTHER; note = 2'-deoxy-2'-fluorocytidine-3'-phosphate
  modified_base 18: mod_base = OTHER; note = 2'-O-methyluridine-3'-phosphate
  modified_base 19: mod_base = OTHER; note = 2'-deoxy-2'-fluorouridine-3'-phosphate
  modified_base 20: mod_base = OTHER; note = 2'-O-methyluridine-3'-phosphate
  modified_base 21: mod_base = OTHER; note = 2'-deoxy-2'-fluorouridine-3'-phosphate ((2S,4R)-1-[29-[[2-(acetylamino)-2-deoxy-beta-D-galactopyra nosyl]oxy]-14,14-bis[[3-[[3-[[5-[[2-(acetylamino)-2-deoxy-b eta-D-galactopyranosyl]oxy]-1-oxopentyl]amino]propyl]amino] -3-oxopropoxy]methyl]-1,12,19,25-tetraoxo-16-oxa-13,20,24-t riazanonacos-1-yl]-4-hydroxy-2-pyrrolidinyl)methyl ester
gttccggatatttgaactttt

SEQ ID NO: 154 - RNA, 21 nt, synthetic construct
  source 1..21: mol_type = other RNA
  modified_base 1: mod_base = OTHER; note = 2'-deoxy-2'-fluoroadenosine-3'-phosphorothioate
  modified_base 2: mod_base = OTHER; note = 2'-O-methyluridine-3'-phosphorothioate
  modified_base 3: mod_base = OTHER; note = 2'-deoxy-2'-fluorouridine-3'-phosphate
  modified_base 4: mod_base = OTHER; note = 2'-O-methyluridine-3'-phosphate
  modified_base 5: mod_base = OTHER; note = 2'-deoxy-2'-fluoroadenosine-3'-phosphate
  modified_base 6: mod_base = OTHER; note = 2'-O-methyladenosine-3'-phosphate
  modified_base 7: mod_base = OTHER; note = 2'-deoxy-2'-fluoroadenosine-3'-phosphate
  modified_base 8: mod_base = OTHER; note = 2'-O-methylcytidine-3'-phosphate
  modified_base 9: mod_base = OTHER; note = 2'-deoxy-2'-fluoroadenosine-3'-phosphate
  modified_base 10: mod_base = OTHER; note = 2'-deoxy-2'-fluoroadenosine-3'-phosphate
  modified_base 11: mod_base = OTHER; note = 2'-deoxy-2'-fluorocytidine-3'-phosphate
  modified_base 12: mod_base = OTHER; note = 2'-O-methyladenosine-3'-phosphate
  modified_base 13: mod_base = OTHER; note = 2'-deoxy-2'-fluoroadenosine-3'-phosphate
  modified_base 14: mod_base = OTHER; note = 2'-O-methylguanosine-3'-phosphate
  modified_base 15: mod_base = OTHER; note = 2'-deoxy-2'-fluorouridine-3'-phosphate
  modified_base 16: mod_base = OTHER; note = 2'-O-methyladenosine-3'-phosphate
  modified_base 17: mod_base = OTHER; note = 2'-deoxy-2'-fluorocytidine-3'-phosphate
  modified_base 18: mod_base = OTHER; note = 2'-O-methylcytidine-3'-phosphate
  modified_base 19: mod_base = OTHER; note = 2'-deoxy-2'-fluorouridine-3'-phosphate
  modified_base 20: mod_base = OTHER; note = 2'-O-methyluridine-3'-phosphate
  modified_base 21: mod_base = OTHER; note = 2'-deoxy-2'-fluorouridine-3'-phosphate ((2S,4R)-1-[29-[[2-(acetylamino)-2-deoxy-beta-D-galactopyra nosyl]oxy]-14,14-bis[[3-[[3-[[5-[[2-(acetylamino)-2-deoxy-b eta-D-galactopyranosyl]oxy]-1-oxopentyl]amino]propyl]amino] -3-oxopropoxy]methyl]-1,12,19,25-tetraoxo-16-oxa-13,20,24-t riazanonacos-1-yl]-4-hydroxy-2-pyrrolidinyl)methyl ester
atttaaacaacaagtaccttt

SEQ ID NO: 155 - RNA, 21 nt, synthetic construct
  source 1..21: mol_type = other RNA
  modified_base 1: mod_base = OTHER; note = 2'-deoxy-2'-fluoroadenosine-3'-phosphorothioate
  modified_base 2: mod_base = OTHER; note = 2'-O-methyluridine-3'-phosphorothioate
  modified_base 3: mod_base = OTHER; note = 2'-deoxy-2'-fluorouridine-3'-phosphate
  modified_base 4: mod_base = OTHER; note = 2'-O-methyluridine-3'-phosphate
  modified_base 5: mod_base = OTHER; note = 2'-deoxy-2'-fluoroadenosine-3'-phosphate
  modified_base 6: mod_base = OTHER; note = 2'-O-methyladenosine-3'-phosphate
  modified_base 7: mod_base = OTHER; note = 2'-deoxy-2'-fluoroadenosine-3'-phosphate
  modified_base 8: mod_base = OTHER; note = 2'-O-methylcytidine-3'-phosphate
  modified_base 9: mod_base = OTHER; note = 2'-deoxy-2'-fluoroadenosine-3'-phosphate
  modified_base 10: mod_base = OTHER; note = 2'-deoxy-2'-fluoroadenosine-3'-phosphate
  modified_base 11: mod_base = OTHER; note = 2'-deoxy-2'-fluorocytidine-3'-phosphate
  modified_base 12: mod_base = OTHER; note = 2'-O-methyladenosine-3'-phosphate
  modified_base 13: mod_base = OTHER; note = 2'-deoxy-2'-fluoroadenosine-3'-phosphate
  modified_base 14: mod_base = OTHER; note = 2'-O-methylguanosine-3'-phosphate
  modified_base 15: mod_base = OTHER; note = 2'-deoxy-2'-fluorouridine-3'-phosphate
  modified_base 16: mod_base = OTHER; note = 2'-O-methyladenosine-3'-phosphate
  modified_base 17: mod_base = OTHER; note = 2'-deoxy-2'-fluorocytidine-3'-phosphate
  modified_base 18: mod_base = OTHER; note = 2'-O-methylcytidine-3'-phosphate
  modified_base 19: mod_base = OTHER; note = 2'-deoxy-2'-fluorouridine-3'-phosphate
  modified_base 20: mod_base = OTHER; note = 2'-O-methyluridine-3'-phosphate
  modified_base 21: mod_base = OTHER; note = 2'-deoxy-2'-fluorouridine-3'-phosphate ((2S,4R)-1-[29-[[2-(acetylamino)-2-deoxy-beta-D-galactopyra nosyl]oxy]-14,14-bis[[3-[[3-[[5-[[2-(acetylamino)-2-deoxy-b eta-D-galactopyranosyl]oxy]-1-oxopentyl]amino]propyl]amino] -3-oxopropoxy]methyl]-1,12,19,25-tetraoxo-16-oxa-13,20,24-t riazanonacos-1-yl]-4-hydroxy-2-pyrrolidinyl)methyl ester
atttaaacaacaagtaccttt

SEQ ID NO: 156 - RNA, 21 nt, synthetic construct
  source 1..21: mol_type = other RNA
  modified_base 1: mod_base = OTHER; note = 2'-deoxy-2'-fluorouridine-3'-phosphorothioate
  modified_base 2: mod_base = OTHER; note = 2'-O-methylguanosine-3'-phosphorothioate
  modified_base 3: mod_base = OTHER; note = 2'-deoxy-2'-fluoroadenosine-3'-phosphate
  modified_base 4: mod_base = OTHER; note = 2'-O-methylcytidine-3'-phosphate
  modified_base 5: mod_base = OTHER; note = 2'-deoxy-2'-fluoroadenosine-3'-phosphate
  modified_base 6: mod_base = OTHER; note = 2'-O-methyladenosine-3'-phosphate
  modified_base 7: mod_base = OTHER; note = 2'-deoxy-2'-fluoroadenosine-3'-phosphate
  modified_base 8: mod_base = OTHER; note = 2'-O-methyladenosine-3'-phosphate
  modified_base 9: mod_base = OTHER; note = 2'-deoxy-2'-fluorouridine-3'-phosphate
  modified_base 10: mod_base = OTHER; note = 2'-deoxy-2'-fluoroadenosine-3'-phosphate
  modified_base 11: mod_base = OTHER; note = 2'-deoxy-2'-fluoroadenosine-3'-phosphate
  modified_base 12: mod_base = OTHER; note = 2'-O-methylcytidine-3'-phosphate
  modified_base 13: mod_base = OTHER; note = 2'-deoxy-2'-fluorouridine-3'-phosphate
  modified_base 14: mod_base = OTHER; note = 2'-O-methylcytidine-3'-phosphate
  modified_base 15: mod_base = OTHER; note = 2'-deoxy-2'-fluoroadenosine-3'-phosphate
  modified_base 16: mod_base = OTHER; note = 2'-O-methylcytidine-3'-phosphate
  modified_base 17: mod_base = OTHER; note = 2'-deoxy-2'-fluorouridine-3'-phosphate
  modified_base 18: mod_base = OTHER; note = 2'-O-methyladenosine-3'-phosphate
  modified_base 19: mod_base = OTHER; note = 2'-deoxy-2'-fluorouridine-3'-phosphate
  modified_base 20: mod_base = OTHER; note = 2'-O-methyladenosine-3'-phosphate
  modified_base 21: mod_base = OTHER; note = 2'-deoxy-2'-fluoroadenosine-3'-phosphate ((2S,4R)-1-[29-[[2-(acetylamino)-2-deoxy-beta-D-galactopyra nosyl]oxy]-14,14-bis[[3-[[3-[[5-[[2-(acetylamino)-2-deoxy-b eta-D-galactopyranosyl]oxy]-1-oxopentyl]amino]propyl]amino] -3-oxopropoxy]methyl]-1,12,19,25-tetraoxo-16-oxa-13,20,24-t riazanonacos-1-yl]-4-hydroxy-2-pyrrolidinyl)methyl ester
tgacaaaataactcactataa

SEQ ID NO: 157 - RNA, 21 nt, synthetic construct
  source 1..21: mol_type = other RNA
  modified_base 1: mod_base = OTHER; note = 2'-deoxy-2'-fluorouridine-3'-phosphorothioate
  modified_base 2: mod_base = OTHER; note = 2'-O-methylguanosine-3'-phosphorothioate
  modified_base 3: mod_base = OTHER; note = 2'-deoxy-2'-fluoroadenosine-3'-phosphate
  modified_base 4: mod_base = OTHER; note = 2'-O-methylcytidine-3'-phosphate
  modified_base 5: mod_base = OTHER; note = 2'-deoxy-2'-fluoroadenosine-3'-phosphate
  modified_base 6: mod_base = OTHER; note = 2'-O-methyladenosine-3'-phosphate
  modified_base 7: mod_base = OTHER; note = 2'-deoxy-2'-fluoroadenosine-3'-phosphate
  modified_base 8: mod_base = OTHER; note = 2'-O-methyladenosine-3'-phosphate
  modified_base 9: mod_base = OTHER; note = 2'-deoxy-2'-fluorouridine-3'-phosphate
  modified_base 10: mod_base = OTHER; note = 2'-deoxy-2'-fluoroadenosine-3'-phosphate
  modified_base 11: mod_base = OTHER; note = 2'-deoxy-2'-fluoroadenosine-3'-phosphate
  modified_base 12: mod_base = OTHER; note = 2'-O-methylcytidine-3'-phosphate
  modified_base 13: mod_base = OTHER; note = 2'-deoxy-2'-fluorouridine-3'-phosphate
  modified_base 14: mod_base = OTHER; note = 2'-O-methylcytidine-3'-phosphate
  modified_base 15: mod_base = OTHER; note = 2'-deoxy-2'-fluoroadenosine-3'-phosphate
  modified_base 16: mod_base = OTHER; note = 2'-O-methylcytidine-3'-phosphate
  modified_base 17: mod_base = OTHER; note = 2'-deoxy-2'-fluorouridine-3'-phosphate
  modified_base 18: mod_base = OTHER; note = 2'-O-methyladenosine-3'-phosphate
  modified_base 19: mod_base = OTHER; note = 2'-deoxy-2'-fluorouridine-3'-phosphate
  modified_base 20: mod_base = OTHER; note = 2'-O-methyladenosine-3'-phosphate
  modified_base 21: mod_base = OTHER; note = 2'-deoxy-2'-fluoroadenosine-3'-phosphate ((2S,4R)-1-[29-[[2-(acetylamino)-2-deoxy-beta-D-galactopyra nosyl]oxy]-14,14-bis[[3-[[3-[[5-[[2-(acetylamino)-2-deoxy-b eta-D-galactopyranosyl]oxy]-1-oxopentyl]amino]propyl]amino] -3-oxopropoxy]methyl]-1,12,19,25-tetraoxo-16-oxa-13,20,24-t riazanonacos-1-yl]-4-hydroxy-2-pyrrolidinyl)methyl ester
tgacaaaataactcactataa

SEQ ID NO: 158 - RNA, 21 nt, synthetic construct
  source 1..21: mol_type = other RNA
  modified_base 1: mod_base = OTHER; note = 2'-deoxy-2'-fluoroguanosine-3'-phosphorothioate
  modified_base 2: mod_base = OTHER; note = 2'-O-methyladenosine-3'-phosphorothioate
  modified_base 3: mod_base = OTHER; note = 2'-deoxy-2'-fluorocytidine-3'-phosphate
  modified_base 4: mod_base = OTHER; note = 2'-O-methyladenosine-3'-phosphate
  modified_base 5: mod_base = OTHER; note = 2'-deoxy-2'-fluoroadenosine-3'-phosphate
  modified_base 6: mod_base = OTHER; note = 2'-O-methyladenosine-3'-phosphate
  modified_base 7: mod_base = OTHER; note = 2'-deoxy-2'-fluoroadenosine-3'-phosphate
  modified_base 8: mod_base = OTHER; note = 2'-O-methyluridine-3'-phosphate
  modified_base 9: mod_base = OTHER; note = 2'-deoxy-2'-fluoroadenosine-3'-phosphate
  modified_base 10: mod_base = OTHER; note = 2'-deoxy-2'-fluoroadenosine-3'-phosphate
  modified_base 11: mod_base = OTHER; note = 2'-deoxy-2'-fluorocytidine-3'-phosphate
  modified_base 12: mod_base = OTHER; note = 2'-O-methyluridine-3'-phosphate
  modified_base 13: mod_base = OTHER; note = 2'-deoxy-2'-fluorocytidine-3'-phosphate
  modified_base 14: mod_base = OTHER; note = 2'-O-methyladenosine-3'-phosphate
  modified_base 15: mod_base = OTHER; note = 2'-deoxy-2'-fluorocytidine-3'-phosphate
  modified_base 16: mod_base = OTHER; note = 2'-O-methyluridine-3'-phosphate
  modified_base 17: mod_base = OTHER; note = 2'-deoxy-2'-fluoroadenosine-3'-phosphate
  modified_base 18: mod_base = OTHER; note = 2'-O-methyluridine-3'-phosphate
  modified_base 19: mod_base = OTHER; note = 2'-deoxy-2'-fluoroadenosine-3'-phosphate
  modified_base 20: mod_base = OTHER; note = 2'-O-methyladenosine-3'-phosphate
  modified_base 21: mod_base = OTHER; note = 2'-deoxy-2'-fluorouridine-3'-phosphate ((2S,4R)-1-[29-[[2-(acetylamino)-2-deoxy-beta-D-galactopyra nosyl]oxy]-14,14-bis[[3-[[3-[[5-[[2-(acetylamino)-2-deoxy-b eta-D-galactopyranosyl]oxy]-1-oxopentyl]amino]propyl]amino] -3-oxopropoxy]methyl]-1,12,19,25-tetraoxo-16-oxa-13,20,24-t riazanonacos-1-yl]-4-hydroxy-2-pyrrolidinyl)methyl ester
gacaaaataactcactataat

SEQ ID NO: 159 - RNA, 21 nt, synthetic construct
  source 1..21: mol_type = other RNA
  modified_base 1: mod_base = OTHER; note = 2'-deoxy-2'-fluoroguanosine-3'-phosphorothioate
  modified_base 2: mod_base = OTHER; note = 2'-O-methyladenosine-3'-phosphorothioate
  modified_base 3: mod_base = OTHER; note = 2'-deoxy-2'-fluorocytidine-3'-phosphate
  modified_base 4: mod_base = OTHER; note = 2'-O-methyladenosine-3'-phosphate
  modified_base 5: mod_base = OTHER; note = 2'-deoxy-2'-fluoroadenosine-3'-phosphate
  modified_base 6: mod_base = OTHER; note = 2'-O-methyladenosine-3'-phosphate
  modified_base 7: mod_base = OTHER; note = 2'-deoxy-2'-fluoroadenosine-3'-phosphate
  modified_base 8: mod_base = OTHER; note = 2'-O-methyluridine-3'-phosphate
  modified_base 9: mod_base = OTHER; note = 2'-deoxy-2'-fluoroadenosine-3'-phosphate
  modified_base 10: mod_base = OTHER; note = 2'-deoxy-2'-fluoroadenosine-3'-phosphate
  modified_base 11: mod_base = OTHER; note = 2'-deoxy-2'-fluorocytidine-3'-phosphate
  modified_base 12: mod_base = OTHER; note = 2'-O-methyluridine-3'-phosphate
  modified_base 13: mod_base = OTHER; note = 2'-deoxy-2'-fluorocytidine-3'-phosphate
  modified_base 14: mod_base = OTHER; note = 2'-O-methyladenosine-3'-phosphate
  modified_base 15: mod_base = OTHER; note = 2'-deoxy-2'-fluorocytidine-3'-phosphate
  modified_base 16: mod_base = OTHER; note = 2'-O-methyluridine-3'-phosphate
  modified_base 17: mod_base = OTHER; note = 2'-deoxy-2'-fluoroadenosine-3'-phosphate
  modified_base 18: mod_base = OTHER; note = 2'-O-methyluridine-3'-phosphate
  modified_base 19: mod_base = OTHER; note = 2'-deoxy-2'-fluoroadenosine-3'-phosphate
  modified_base 20: mod_base = OTHER; note = 2'-O-methyladenosine-3'-phosphate
  modified_base 21: mod_base = OTHER; note = 2'-deoxy-2'-fluorouridine-3'-phosphate ((2S,4R)-1-[29-[[2-(acetylamino)-2-deoxy-beta-D-galactopyra nosyl]oxy]-14,14-bis[[3-[[3-[[5-[[2-(acetylamino)-2-deoxy-b eta-D-galactopyranosyl]oxy]-1-oxopentyl]amino]propyl]amino] -3-oxopropoxy]methyl]-1,12,19,25-tetraoxo-16-oxa-13,20,24-t riazanonacos-1-yl]-4-hydroxy-2-pyrrolidinyl)methyl ester
gacaaaataactcactataat

SEQ ID NO: 160 - RNA, 21 nt, synthetic construct
  source 1..21: mol_type = other RNA
  modified_base 1: mod_base = OTHER; note = 2'-deoxy-2'-fluoroguanosine-3'-phosphorothioate
  modified_base 2: mod_base = OTHER; note = 2'-O-methyluridine-3'-phosphorothioate
  modified_base 3: mod_base = OTHER; note = 2'-deoxy-2'-fluorouridine-3'-phosphate
  modified_base 4: mod_base = OTHER; note = 2'-O-methylcytidine-3'-phosphate
  modified_base 5: mod_base = OTHER; note = 2'-deoxy-2'-fluorocytidine-3'-phosphate
  modified_base 6: mod_base = OTHER; note = 2'-O-methylguanosine-3'-phosphate
  modified_base 7: mod_base = OTHER; note = 2'-deoxy-2'-fluoroguanosine-3'-phosphate
  modified_base 8: mod_base = OTHER; note = 2'-O-methyladenosine-3'-phosphate
  modified_base 9: mod_base = OTHER; note = 2'-deoxy-2'-fluorouridine-3'-phosphate
  modified_base 10: mod_base = OTHER; note = 2'-deoxy-2'-fluoroadenosine-3'-phosphate
  modified_base 11: mod_base = OTHER; note = 2'-deoxy-2'-fluorouridine-3'-phosphate
  modified_base 12: mod_base = OTHER; note = 2'-O-methyluridine-3'-phosphate
  modified_base 13: mod_base = OTHER; note = 2'-deoxy-2'-fluorouridine-3'-phosphate
  modified_base 14: mod_base = OTHER; note = 2'-O-methylguanosine-3'-phosphate
  modified_base 15: mod_base = OTHER; note = 2'-deoxy-2'-fluoroadenosine-3'-phosphate
  modified_base 16: mod_base = OTHER; note = 2'-O-methyladenosine-3'-phosphate
  modified_base 17: mod_base = OTHER; note = 2'-deoxy-2'-fluorocytidine-3'-phosphate
  modified_base 18: mod_base = OTHER; note = 2'-O-methyluridine-3'-phosphate
  modified_base 19: mod_base = OTHER; note = 2'-deoxy-2'-fluorouridine-3'-phosphate
  modified_base 20: mod_base = OTHER; note = 2'-O-methyluridine-3'-phosphate
  modified_base 21: mod_base = OTHER; note = 2'-deoxy-2'-fluorouridine-3'-phosphate ((2S,4R)-1-[29-[[2-(acetylamino)-2-deoxy-beta-D-galactopyra nosyl]oxy]-14,14-bis[[3-[[3-[[5-[[2-(acetylamino)-2-deoxy-b eta-D-galactopyranosyl]oxy]-1-oxopentyl]amino]propyl]amino] -3-oxopropoxy]methyl]-1,12,19,25-tetraoxo-16-oxa-13,20,24-t riazanonacos-1-yl]-4-hydroxy-2-pyrrolidinyl)methyl ester
gttccggatatttgaactttt

SEQ ID NO: 161 - RNA, 21 nt, synthetic construct
  source 1..21: mol_type = other RNA
  modified_base 1: mod_base = OTHER; note = 2'-deoxy-2'-fluoroguanosine-3'-phosphorothioate
  modified_base 2: mod_base = OTHER; note = 2'-O-methyluridine-3'-phosphorothioate
  modified_base 3: mod_base = OTHER; note = 2'-deoxy-2'-fluorouridine-3'-phosphate
  modified_base 4: mod_base = OTHER; note = 2'-O-methylcytidine-3'-phosphate
  modified_base 5: mod_base = OTHER; note = 2'-deoxy-2'-fluorocytidine-3'-phosphate
  modified_base 6: mod_base = OTHER; note = 2'-O-methylguanosine-3'-phosphate
  modified_base 7: mod_base = OTHER; note = 2'-deoxy-2'-fluoroguanosine-3'-phosphate
  modified_base 8: mod_base = OTHER; note = 2'-O-methyladenosine-3'-phosphate
  modified_base 9: mod_base = OTHER; note = 2'-deoxy-2'-fluorouridine-3'-phosphate
  modified_base 10: mod_base = OTHER; note = 2'-deoxy-2'-fluoroadenosine-3'-phosphate
  modified_base 11: mod_base = OTHER; note = 2'-deoxy-2'-fluorouridine-3'-phosphate
  modified_base 12: mod_base = OTHER; note = 2'-O-methyluridine-3'-phosphate
  modified_base 13: mod_base = OTHER; note = 2'-deoxy-2'-fluorouridine-3'-phosphate
  modified_base 14: mod_base = OTHER; note = 2'-O-methylguanosine-3'-phosphate
  modified_base 15: mod_base = OTHER; note = 2'-deoxy-2'-fluoroadenosine-3'-phosphate
  modified_base 16: mod_base = OTHER; note = 2'-O-methyladenosine-3'-phosphate
  modified_base 17: mod_base = OTHER; note = 2'-deoxy-2'-fluorocytidine-3'-phosphate
  modified_base 18: mod_base = OTHER; note = 2'-O-methyluridine-3'-phosphate
  modified_base 19: mod_base = OTHER; note = 2'-deoxy-2'-fluorouridine-3'-phosphate
  modified_base 20: mod_base = OTHER; note = 2'-O-methyluridine-3'-phosphate
  modified_base 21: mod_base = OTHER; note = 2'-deoxy-2'-fluorouridine-3'-phosphate ((2S,4R)-1-[29-[[2-(acetylamino)-2-deoxy-beta-D-galactopyra nosyl]oxy]-14,14-bis[[3-[[3-[[5-[[2-(acetylamino)-2-deoxy-b eta-D-galactopyranosyl]oxy]-1-oxopentyl]amino]propyl]amino] -3-oxopropoxy]methyl]-1,12,19,25-tetraoxo-16-oxa-13,20,24-t riazanonacos-1-yl]-4-hydroxy-2-pyrrolidinyl)methyl ester
gttccggatatttgaactttt

SEQ ID NO: 162 - RNA, 21 nt, synthetic construct
  source 1..21: mol_type = other RNA
  modified_base 1: mod_base = OTHER; note = 2'-deoxy-2'-fluorouridine-3'-phosphorothioate
  modified_base 2: mod_base = OTHER; note = 2'-O-methylguanosine-3'-phosphorothioate
  modified_base 3: mod_base = OTHER; note = 2'-deoxy-2'-fluorocytidine-3'-phosphate
  modified_base 4: mod_base = OTHER; note = 2'-O-methyladenosine-3'-phosphate
  modified_base 5: mod_base = OTHER; note = 2'-deoxy-2'-fluoroguanosine-3'-phosphate
  modified_base 6: mod_base = OTHER; note = 2'-O-methyladenosine-3'-phosphate
  modified_base 7: mod_base = OTHER; note = 2'-deoxy-2'-fluorouridine-3'-phosphate
  modified_base 8: mod_base = OTHER; note = 2'-O-methylcytidine-3'-phosphate
  modified_base 9: mod_base = OTHER; note = 2'-deoxy-2'-fluoroadenosine-3'-phosphate
  modified_base 10: mod_base = OTHER; note = 2'-deoxy-2'-fluoroadenosine-3'-phosphate
  modified_base 11: mod_base = OTHER; note = 2'-deoxy-2'-fluoroadenosine-3'-phosphate
  modified_base 12: mod_base = OTHER; note = 2'-O-methylcytidine-3'-phosphate
  modified_base 13: mod_base = OTHER; note = 2'-deoxy-2'-fluoroadenosine-3'-phosphate
  modified_base 14: mod_base = OTHER; note = 2'-O-methylcytidine-3'-phosphate
  modified_base 15: mod_base = OTHER; note = 2'-deoxy-2'-fluoroadenosine-3'-phosphate
  modified_base 16: mod_base = OTHER; note = 2'-O-methyladenosine-3'-phosphate
  modified_base 17: mod_base = OTHER; note = 2'-deoxy-2'-fluorouridine-3'-phosphate
  modified_base 18: mod_base = OTHER; note = 2'-O-methyluridine-3'-phosphate
  modified_base 19: mod_base = OTHER; note = 2'-deoxy-2'-fluorouridine-3'-phosphate
  modified_base 20: mod_base = OTHER; note = 2'-O-methylcytidine-3'-phosphate
  modified_base 21: mod_base = OTHER; note = 2'-deoxy-2'-fluoroadenosine-3'-phosphate ((2S,4R)-1-[29-[[2-(acetylamino)-2-deoxy-beta-D-galactopyra nosyl]oxy]-14,14-bis[[3-[[3-[[5-[[2-(acetylamino)-2-deoxy-b eta-D-galactopyranosyl]oxy]-1-oxopentyl]amino]propyl]amino] -3-oxopropoxy]methyl]-1,12,19,25-tetraoxo-16-oxa-13,20,24-t riazanonacos-1-yl]-4-hydroxy-2-pyrrolidinyl)methyl ester
tgcagatcaaacacaatttca

SEQ ID NO: 163 - RNA, 21 nt, synthetic construct
  source 1..21: mol_type = other RNA
  modified_base 1: mod_base = OTHER; note = 2'-deoxy-2'-fluorouridine-3'-phosphorothioate
  modified_base 2: mod_base = OTHER; note = 2'-O-methylguanosine-3'-phosphorothioate
  modified_base 3: mod_base = OTHER; note = 2'-deoxy-2'-fluorocytidine-3'-phosphate
  modified_base 4: mod_base = OTHER; note = 2'-O-methyladenosine-3'-phosphate
  modified_base 5: mod_base = OTHER; note = 2'-deoxy-2'-fluoroguanosine-3'-phosphate
  modified_base 6: mod_base = OTHER; note = 2'-O-methyladenosine-3'-phosphate
  modified_base 7: mod_base = OTHER; note = 2'-deoxy-2'-fluorouridine-3'-phosphate
  modified_base 8: mod_base = OTHER; note = 2'-O-methylcytidine-3'-phosphate
  modified_base 9: mod_base = OTHER; note = 2'-deoxy-2'-fluoroadenosine-3'-phosphate
  modified_base 10: mod_base = OTHER; note = 2'-deoxy-2'-fluoroadenosine-3'-phosphate
  modified_base 11: mod_base = OTHER; note = 2'-deoxy-2'-fluoroadenosine-3'-phosphate
  modified_base 12: mod_base = OTHER; note = 2'-O-methylcytidine-3'-phosphate
  modified_base 13: mod_base = OTHER; note = 2'-deoxy-2'-fluoroadenosine-3'-phosphate
  modified_base 14: mod_base = OTHER; note = 2'-O-methylcytidine-3'-phosphate
  modified_base 15: mod_base = OTHER; note = 2'-deoxy-2'-fluoroadenosine-3'-phosphate
  modified_base 16: mod_base = OTHER; note = 2'-O-methyladenosine-3'-phosphate
  modified_base 17: mod_base = OTHER; note = 2'-deoxy-2'-fluorouridine-3'-phosphate
  modified_base 18: mod_base = OTHER; note = 2'-O-methyluridine-3'-phosphate
  modified_base 19: mod_base = OTHER; note = 2'-deoxy-2'-fluorouridine-3'-phosphate
  modified_base 20: mod_base = OTHER; note = 2'-O-methylcytidine-3'-phosphate
  modified_base 21: mod_base = OTHER; note = 2'-deoxy-2'-fluoroadenosine-3'-phosphate ((2S,4R)-1-[29-[[2-(acetylamino)-2-deoxy-beta-D-galactopyra nosyl]oxy]-14,14-bis[[3-[[3-[[5-[[2-(acetylamino)-2-deoxy-b eta-D-galactopyranosyl]oxy]-1-oxopentyl]amino]propyl]amino] -3-oxopropoxy]methyl]-1,12,19,25-tetraoxo-16-oxa-13,20,24-t riazanonacos-1-yl]-4-hydroxy-2-pyrrolidinyl)methyl ester
tgcagatcaaacacaatttca

SEQ ID NO: 164 - RNA, 21 nt, synthetic construct
  source 1..21: mol_type = other RNA
  modified_base 1: mod_base = OTHER; note = 2'-deoxy-2'-fluoroadenosine-3'-phosphorothioate
  modified_base 2: mod_base = OTHER; note = 2'-O-methyladenosine-3'-phosphorothioate
  modified_base 3: mod_base = OTHER; note = 2'-deoxy-2'-fluoroguanosine-3'-phosphate
  modified_base 4: mod_base = OTHER; note = 2'-O-methylcytidine-3'-phosphate
  modified_base 5: mod_base = OTHER; note = 2'-deoxy-2'-fluoroadenosine-3'-phosphate
  modified_base 6: mod_base = OTHER; note = 2'-O-methyladenosine-3'-phosphate
  modified_base 7: mod_base = OTHER; note = 2'-deoxy-2'-fluoroguanosine-3'-phosphate
  modified_base 8: mod_base = OTHER; note = 2'-O-methyladenosine-3'-phosphate
  modified_base 9: mod_base = OTHER; note = 2'-deoxy-2'-fluorouridine-3'-phosphate
  modified_base 10: mod_base = OTHER; note = 2'-deoxy-2'-fluoroadenosine-3'-phosphate
  modified_base 11: mod_base = OTHER; note = 2'-deoxy-2'-fluorouridine-3'-phosphate
  modified_base 12: mod_base = OTHER; note = 2'-O-methyluridine-3'-phosphate
  modified_base 13: mod_base = OTHER; note = 2'-deoxy-2'-fluorouridine-3'-phosphate
  modified_base 14: mod_base = OTHER; note = 2'-O-methyluridine-3'-phosphate
  modified_base 15: mod_base = OTHER; note = 2'-deoxy-2'-fluorouridine-3'-phosphate
  modified_base 16: mod_base = OTHER; note = 2'-O-methyladenosine-3'-phosphate
  modified_base 17: mod_base = OTHER; note = 2'-deoxy-2'-fluorouridine-3'-phosphate
  modified_base 18: mod_base = OTHER; note = 2'-O-methyladenosine-3'-phosphate
  modified_base 19: mod_base = OTHER; note = 2'-deoxy-2'-fluoroadenosine-3'-phosphate
  modified_base 20: mod_base = OTHER; note = 2'-O-methyluridine-3'-phosphate
  modified_base 21: mod_base = OTHER; note = 2'-deoxy-2'-fluoroadenosine-3'-phosphate ((2S,4R)-1-[29-[[2-(acetylamino)-2-deoxy-beta-D-galactopyra nosyl]oxy]-14,14-bis[[3-[[3-[[5-[[2-(acetylamino)-2-deoxy-b eta-D-galactopyranosyl]oxy]-1-oxopentyl]amino]propyl]amino] -3-oxopropoxy]methyl]-1,12,19,25-tetraoxo-16-oxa-13,20,24-t riazanonacos-1-yl]-4-hydroxy-2-pyrrolidinyl)methyl ester
aagcaagatatttttataata

SEQ ID NO: 165 - RNA, 21 nt, synthetic construct
  source 1..21: mol_type = other RNA
  modified_base 1: mod_base = OTHER; note = 2'-deoxy-2'-fluoroadenosine-3'-phosphorothioate
  modified_base 2: mod_base = OTHER; note = 2'-O-methyladenosine-3'-phosphorothioate
  modified_base 3: mod_base = OTHER; note = 2'-deoxy-2'-fluoroguanosine-3'-phosphate
  modified_base 4: mod_base = OTHER; note = 2'-O-methylcytidine-3'-phosphate
  modified_base 5: mod_base = OTHER; note = 2'-deoxy-2'-fluoroadenosine-3'-phosphate
  modified_base 6: mod_base = OTHER; note = 2'-O-methyladenosine-3'-phosphate
  modified_base 7: mod_base = OTHER; note = 2'-deoxy-2'-fluoroguanosine-3'-phosphate
  modified_base 8: mod_base = OTHER; note = 2'-O-methyladenosine-3'-phosphate
  modified_base 9: mod_base = OTHER; note = 2'-deoxy-2'-fluorouridine-3'-phosphate
  modified_base 10: mod_base = OTHER; note = 2'-deoxy-2'-fluoroadenosine-3'-phosphate
  modified_base 11: mod_base = OTHER; note = 2'-deoxy-2'-fluorouridine-3'-phosphate
  modified_base 12: mod_base = OTHER; note = 2'-O-methyluridine-3'-phosphate
  modified_base 13: mod_base = OTHER; note = 2'-deoxy-2'-fluorouridine-3'-phosphate
  modified_base 14: mod_base = OTHER; note = 2'-O-methyluridine-3'-phosphate
  modified_base 15: mod_base = OTHER; note = 2'-deoxy-2'-fluorouridine-3'-phosphate
  modified_base 16: mod_base = OTHER; note = 2'-O-methyladenosine-3'-phosphate
  modified_base 17: mod_base = OTHER; note = 2'-deoxy-2'-fluorouridine-3'-phosphate
  modified_base 18: mod_base = OTHER; note = 2'-O-methyladenosine-3'-phosphate
  modified_base 19: mod_base = OTHER; note = 2'-deoxy-2'-fluoroadenosine-3'-phosphate
  modified_base 20: mod_base = OTHER; note = 2'-O-methyluridine-3'-phosphate
  modified_base 21: mod_base = OTHER; note = 2'-deoxy-2'-fluoroadenosine-3'-phosphate ((2S,4R)-1-[29-[[2-(acetylamino)-2-deoxy-beta-D-galactopyra nosyl]oxy]-14,14-bis[[3-[[3-[[5-[[2-(acetylamino)-2-deoxy-b eta-D-galactopyranosyl]oxy]-1-oxopentyl]amino]propyl]amino] -3-oxopropoxy]methyl]-1,12,19,25-tetraoxo-16-oxa-13,20,24-t riazanonacos-1-yl]-4-hydroxy-2-pyrrolidinyl)methyl ester
aagcaagatatttttataata

SEQ ID NO: 166 - RNA, 21 nt, synthetic construct
  source 1..21: mol_type = other RNA
  modified_base 1: mod_base = OTHER; note = 2'-deoxy-2'-fluorocytidine-3'-phosphorothioate
  modified_base 2: mod_base = OTHER; note = 2'-O-methyladenosine-3'-phosphorothioate
  modified_base 3: mod_base = OTHER; note = 2'-deoxy-2'-fluoroguanosine-3'-phosphate
  modified_base 4: mod_base = OTHER; note = 2'-O-methyladenosine-3'-phosphate
  modified_base 5: mod_base = OTHER; note = 2'-deoxy-2'-fluorouridine-3'-phosphate
  modified_base 6: mod_base = OTHER; note = 2'-O-methylcytidine-3'-phosphate
  modified_base 7: mod_base = OTHER; note = 2'-deoxy-2'-fluoroadenosine-3'-phosphate
  modified_base 8: mod_base = OTHER; note = 2'-O-methyladenosine-3'-phosphate
  modified_base 9: mod_base = OTHER; note = 2'-deoxy-2'-fluoroadenosine-3'-phosphate
  modified_base 10: mod_base = OTHER; note = 2'-deoxy-2'-fluorocytidine-3'-phosphate
  modified_base 11: mod_base = OTHER; note = 2'-deoxy-2'-fluoroadenosine-3'-phosphate
  modified_base 12: mod_base = OTHER; note = 2'-O-methylcytidine-3'-phosphate
  modified_base 13: mod_base = OTHER; note = 2'-deoxy-2'-fluoroadenosine-3'-phosphate
  modified_base 14: mod_base = OTHER; note = 2'-O-methyladenosine-3'-phosphate
  modified_base 15: mod_base = OTHER; note = 2'-deoxy-2'-fluorouridine-3'-phosphate
  modified_base 16: mod_base = OTHER; note = 2'-O-methyluridine-3'-phosphate
  modified_base 17: mod_base = OTHER; note = 2'-deoxy-2'-fluorouridine-3'-phosphate
  modified_base 18: mod_base = OTHER; note = 2'-O-methylcytidine-3'-phosphate
  modified_base 19: mod_base = OTHER; note = 2'-deoxy-2'-fluoroadenosine-3'-phosphate
  modified_base 20: mod_base = OTHER; note = 2'-O-methylguanosine-3'-phosphate
  modified_base 21: mod_base = OTHER; note = 2'-deoxy-2'-fluorouridine-3'-phosphate ((2S,4R)-1-[29-[[2-(acetylamino)-2-deoxy-beta-D-galactopyra nosyl]oxy]-14,14-bis[[3-[[3-[[5-[[2-(acetylamino)-2-deoxy-b eta-D-galactopyranosyl]oxy]-1-oxopentyl]amino]propyl]amino] -3-oxopropoxy]methyl]-1,12,19,25-tetraoxo-16-oxa-13,20,24-t riazanonacos-1-yl]-4-hydroxy-2-pyrrolidinyl)methyl ester
cagatcaaacacaatttcagt

SEQ ID NO: 167 - RNA, 21 nt, synthetic construct
  source 1..21: mol_type = other RNA
  modified_base 1: mod_base = OTHER; note = 2'-deoxy-2'-fluorocytidine-3'-phosphorothioate
  modified_base 2: mod_base = OTHER; note = 2'-O-methyladenosine-3'-phosphorothioate
  modified_base 3: mod_base = OTHER; note = 2'-deoxy-2'-fluoroguanosine-3'-phosphate
  modified_base 4: mod_base = OTHER; note = 2'-O-methyladenosine-3'-phosphate
  modified_base 5: mod_base = OTHER; note = 2'-deoxy-2'-fluorouridine-3'-phosphate
  modified_base 6: mod_base = OTHER; note = 2'-O-methylcytidine-3'-phosphate
  modified_base 7: mod_base = OTHER; note = 2'-deoxy-2'-fluoroadenosine-3'-phosphate
  modified_base 8: mod_base = OTHER; note = 2'-O-methyladenosine-3'-phosphate
  modified_base 9: mod_base = OTHER; note = 2'-deoxy-2'-fluoroadenosine-3'-phosphate
  modified_base 10: mod_base = OTHER; note = 2'-deoxy-2'-fluorocytidine-3'-phosphate
  modified_base 11: mod_base = OTHER; note = 2'-deoxy-2'-fluoroadenosine-3'-phosphate
  modified_base 12: mod_base = OTHER; note = 2'-O-methylcytidine-3'-phosphate
  modified_base 13: mod_base = OTHER; note = 2'-deoxy-2'-fluoroadenosine-3'-phosphate
  modified_base 14: mod_base = OTHER; note = 2'-O-methyladenosine-3'-phosphate
  modified_base 15: mod_base = OTHER; note = 2'-deoxy-2'-fluorouridine-3'-phosphate
  modified_base 16: mod_base = OTHER; note = 2'-O-methyluridine-3'-phosphate
  modified_base 17: mod_base = OTHER; note = 2'-deoxy-2'-fluorouridine-3'-phosphate
  modified_base 18: mod_base = OTHER; note = 2'-O-methylcytidine-3'-phosphate
  modified_base 19: mod_base = OTHER; note = 2'-deoxy-2'-fluoroadenosine-3'-phosphate
  modified_base 20: mod_base = OTHER; note = 2'-O-methylguanosine-3'-phosphate
  modified_base 21: mod_base = OTHER; note = 2'-deoxy-2'-fluorouridine-3'-phosphate ((2S,4R)-1-[29-[[2-(acetylamino)-2-deoxy-beta-D-galactopyra nosyl]oxy]-14,14-bis[[3-[[3-[[5-[[2-(acetylamino)-2-deoxy-b eta-D-galactopyranosyl]oxy]-1-oxopentyl]amino]propyl]amino] -3-oxopropoxy]methyl]-1,12,19,25-tetraoxo-16-oxa-13,20,24-t riazanonacos-1-yl]-4-hydroxy-2-pyrrolidinyl)methyl ester
cagatcaaacacaatttcagt

SEQ ID NO: 168 - RNA, 23 nt, synthetic construct
  source 1..23: mol_type = other RNA
  modified_base 1: mod_base = OTHER; note = 2'-O-methyladenosine-3'-phosphate
  modified_base 2: mod_base = OTHER; note = 2'-deoxy-2'-fluoroadenosine-3'-phosphate
  modified_base 3: mod_base = OTHER; note = 2'-O-methylguanosine-3'-phosphate
  modified_base 4: mod_base = OTHER; note = 2'-deoxy-2'-fluorouridine-3'-phosphate
  modified_base 5: mod_base = OTHER; note = 2'-O-methyladenosine-3'-phosphate
  modified_base 6: mod_base = OTHER; note = 2'-deoxy-2'-fluoroadenosine-3'-phosphate
  modified_base 7: mod_base = OTHER; note = 2'-O-methyluridine-3'-phosphate
  modified_base 8: mod_base = OTHER; note = 2'-deoxy-2'-fluorouridine-3'-phosphate
  modified_base 9: mod_base = OTHER; note = 2'-O-methyladenosine-3'-phosphate
  modified_base 10: mod_base = OTHER; note = 2'-deoxy-2'-fluorouridine-3'-phosphate
  modified_base 11: mod_base = OTHER; note = 2'-O-methyladenosine-3'-phosphate
  modified_base 12: mod_base = OTHER; note = 2'-O-methylguanosine-3'-phosphate
  modified_base 13: mod_base = OTHER; note = 2'-O-methyluridine-3'-phosphate
  modified_base 14: mod_base = OTHER; note = 2'-deoxy-2'-fluoroguanosine-3'-phosphate
  modified_base 15: mod_base = OTHER; note = 2'-O-methyladenosine-3'-phosphate
  modified_base 16: mod_base = OTHER; note = 2'-deoxy-2'-fluoroguanosine-3'-phosphate
  modified_base 17: mod_base = OTHER; note = 2'-O-methyluridine-3'-phosphate
  modified_base 18: mod_base = OTHER; note = 2'-deoxy-2'-fluorouridine-3'-phosphate
  modified_base 19: mod_base = OTHER; note = 2'-O-methyladenosine-3'-phosphate
  modified_base 20: mod_base = OTHER; note = 2'-deoxy-2'-fluorouridine-3'-phosphate
  modified_base 21: mod_base = OTHER; note = 2'-O-methyluridine-3'-phosphorothioate
  modified_base 22: mod_base = OTHER; note = 2'-deoxy-2'-fluorouridine-3'-phosphorothioate
  modified_base 23: mod_base = OTHER; note = 2'-O-methyluridine
aagtaattatagtgagttatttt

SEQ ID NO: 169 - RNA, 23 nt, synthetic construct
  source 1..23: mol_type = other RNA
  modified_base 1: mod_base = OTHER; note = 2'-O-methyluridine-3'-phosphate
  modified_base 2: mod_base = OTHER; note = 2'-deoxy-2'-fluorouridine-3'-phosphate
  modified_base 3: mod_base = OTHER; note = 2'-O-methyladenosine-3'-phosphate
  modified_base 4: mod_base = OTHER; note = 2'-deoxy-2'-fluorouridine-3'-phosphate
  modified_base 5: mod_base = OTHER; note = 2'-O-methyladenosine-3'-phosphate
  modified_base 6: mod_base = OTHER; note = 2'-deoxy-2'-fluoroguanosine-3'-phosphate
  modified_base 7: mod_base = OTHER; note = 2'-O-methyluridine-3'-phosphate
  modified_base 8: mod_base = OTHER; note = 2'-deoxy-2'-fluoroguanosine-3'-phosphate
  modified_base 9: mod_base = OTHER; note = 2'-O-methyladenosine-3'-phosphate
  modified_base 10: mod_base = OTHER; note = 2'-deoxy-2'-fluoroguanosine-3'-phosphate
  modified_base 11: mod_base = OTHER; note = 2'-O-methyluridine-3'-phosphate
  modified_base 12: mod_base = OTHER; note = 2'-O-methyluridine-3'-phosphate
  modified_base 13: mod_base = OTHER; note = 2'-O-methyladenosine-3'-phosphate
  modified_base 14: mod_base = OTHER; note = 2'-deoxy-2'-fluorouridine-3'-phosphate
  modified_base 15: mod_base = OTHER; note = 2'-O-methyluridine-3'-phosphate
  modified_base 16: mod_base = OTHER; note = 2'-deoxy-2'-fluorouridine-3'-phosphate
  modified_base 17: mod_base = OTHER; note = 2'-O-methyluridine-3'-phosphate
  modified_base 18: mod_base = OTHER; note = 2'-deoxy-2'-fluoroguanosine-3'-phosphate
  modified_base 19: mod_base = OTHER; note = 2'-O-methyluridine-3'-phosphate
  modified_base 20: mod_base = OTHER; note = 2'-deoxy-2'-fluorocytidine-3'-phosphate
  modified_base 21: mod_base = OTHER; note = 2'-O-methyladenosine-3'-phosphorothioate
  modified_base 22: mod_base = OTHER; note = 2'-deoxy-2'-fluoroadenosine-3'-phosphorothioate
  modified_base 23: mod_base = OTHER; note = 2'-O-methyluridine
ttatagtgagttattttgtcaat

SEQ ID NO: 170 - RNA, 23 nt, synthetic construct
  source 1..23: mol_type = other RNA
  modified_base 1: mod_base = OTHER; note = 2'-O-methyladenosine-3'-phosphate
  modified_base 2: mod_base = OTHER; note = 2'-deoxy-2'-fluoroadenosine-3'-phosphate
  modified_base 3: mod_base = OTHER; note = 2'-O-methylguanosine-3'-phosphate
  modified_base 4: mod_base = OTHER; note = 2'-deoxy-2'-fluoroguanosine-3'-phosphate
  modified_base 5: mod_base = OTHER; note = 2'-O-methylcytidine-3'-phosphate
  modified_base 6: mod_base = OTHER; note = 2'-deoxy-2'-fluorocytidine-3'-phosphate
  modified_base 7: mod_base = OTHER; note = 2'-O-methyladenosine-3'-phosphate
  modified_base 8: mod_base = OTHER; note = 2'-deoxy-2'-fluoroadenosine-3'-phosphate
  modified_base 9: mod_base = OTHER; note = 2'-O-methyluridine-3'-phosphate
  modified_base 10: mod_base = OTHER; note = 2'-deoxy-2'-fluorouridine-3'-phosphate
  modified_base 11: mod_base = OTHER; note = 2'-O-methyluridine-3'-phosphate
  modified_base 12: mod_base = OTHER; note = 2'-O-methylcytidine-3'-phosphate
  modified_base 13: mod_base = OTHER; note = 2'-O-methylcytidine-3'-phosphate
  modified_base 14: mod_base = OTHER; note = 2'-deoxy-2'-fluoroadenosine-3'-phosphate
  modified_base 15: mod_base = OTHER; note = 2'-O-methylguanosine-3'-phosphate
  modified_base 16: mod_base = OTHER; note = 2'-deoxy-2'-fluoroadenosine-3'-phosphate
  modified_base 17: mod_base = OTHER; note = 2'-O-methylguanosine-3'-phosphate
  modified_base 18: mod_base = OTHER; note = 2'-deoxy-2'-fluoroguanosine-3'-phosphate
  modified_base 19: mod_base = OTHER; note = 2'-O-methyladenosine-3'-phosphate
  modified_base 20: mod_base = OTHER; note = 2'-deoxy-2'-fluoroadenosine-3'-phosphate
  modified_base 21: mod_base = OTHER; note = 2'-O-methylguanosine-3'-phosphorothioate
  modified_base 22: mod_base = OTHER; note = 2'-deoxy-2'-fluorocytidine-3'-phosphorothioate
  modified_base 23: mod_base = OTHER; note = 2'-O-methyladenosine
aaggccaatttccagaggaagca

SEQ ID NO: 171 - RNA, 23 nt, synthetic construct
  source 1..23: mol_type = other RNA
  modified_base 1: mod_base = OTHER; note = 2'-O-methyladenosine-3'-phosphate
  modified_base 2: mod_base = OTHER; note = 2'-deoxy-2'-fluorouridine-3'-phosphate
  modified_base 3: mod_base = OTHER; note = 2'-O-methyluridine-3'-phosphate
  modified_base 4: mod_base = OTHER; note = 2'-deoxy-2'-fluoroadenosine-3'-phosphate
  modified_base 5: mod_base = OTHER; note = 2'-O-methyluridine-3'-phosphate
  modified_base 6: mod_base = OTHER; note = 2'-deoxy-2'-fluoroadenosine-3'-phosphate
  modified_base 7: mod_base = OTHER; note = 2'-O-methylguanosine-3'-phosphate
  modified_base 8: mod_base = OTHER; note = 2'-deoxy-2'-fluorouridine-3'-phosphate
  modified_base 9: mod_base = OTHER; note = 2'-O-methylguanosine-3'-phosphate
  modified_base 10: mod_base = OTHER; note = 2'-deoxy-2'-fluoroadenosine-3'-phosphate
  modified_base 11: mod_base = OTHER; note = 2'-O-methylguanosine-3'-phosphate
  modified_base 12: mod_base = OTHER; note = 2'-O-methyluridine-3'-phosphate
  modified_base 13: mod_base = OTHER; note = 2'-O-methyluridine-3'-phosphate
  modified_base 14: mod_base = OTHER; note = 2'-deoxy-2'-fluoroadenosine-3'-phosphate
  modified_base 15: mod_base = OTHER; note = 2'-O-methyluridine-3'-phosphate
  modified_base 16: mod_base = OTHER; note = 2'-deoxy-2'-fluorouridine-3'-phosphate
  modified_base 17: mod_base = OTHER; note = 2'-O-methyluridine-3'-phosphate
  modified_base 18: mod_base = OTHER; note = 2'-deoxy-2'-fluorouridine-3'-phosphate
  modified_base 19: mod_base = OTHER; note = 2'-O-methylguanosine-3'-phosphate
  modified_base 20: mod_base = OTHER; note = 2'-deoxy-2'-fluorouridine-3'-phosphate
  modified_base 21: mod_base = OTHER; note = 2'-O-methylcytidine-3'-phosphorothioate
  modified_base 22: mod_base = OTHER; note = 2'-deoxy-2'-fluoroadenosine-3'-phosphorothioate
  modified_base 23: mod_base = OTHER; note = 2'-O-methyladenosine
attatagtgagttattttgtcaa

SEQ ID NO: 172 - RNA, 23 nt, synthetic construct
  source 1..23: mol_type = other RNA
  modified_base 1: mod_base = OTHER; note = 2'-O-methyluridine-3'-phosphate
  modified_base 2: mod_base = OTHER; note = 2'-deoxy-2'-fluoroguanosine-3'-phosphate
  modified_base 3: mod_base = OTHER; note = 2'-O-methyladenosine-3'-phosphate
  modified_base 4: mod_base = OTHER; note = 2'-deoxy-2'-fluoroadenosine-3'-phosphate
  modified_base 5: mod_base = OTHER; note = 2'-O-methylguanosine-3'-phosphate
  modified_base 6: mod_base = OTHER; note = 2'-deoxy-2'-fluoroguanosine-3'-phosphate
  modified_base 7: mod_base = OTHER; note = 2'-O-methylcytidine-3'-phosphate
  modified_base 8: mod_base = OTHER; note = 2'-deoxy-2'-fluorocytidine-3'-phosphate
  modified_base 9: mod_base = OTHER; note = 2'-O-methyladenosine-3'-phosphate
  modified_base 10: mod_base = OTHER; note = 2'-deoxy-2'-fluoroadenosine-3'-phosphate
  modified_base 11: mod_base = OTHER; note = 2'-O-methyluridine-3'-phosphate
  modified_base 12: mod_base = OTHER; note = 2'-O-methyluridine-3'-phosphate
  modified_base 13: mod_base = OTHER; note = 2'-O-methyluridine-3'-phosphate
  modified_base 14: mod_base = OTHER; note = 2'-deoxy-2'-fluorocytidine-3'-phosphate
  modified_base 15: mod_base = OTHER; note = 2'-O-methylcytidine-3'-phosphate
  modified_base 16: mod_base = OTHER; note = 2'-deoxy-2'-fluoroadenosine-3'-phosphate
  modified_base 17: mod_base = OTHER; note = 2'-O-methylguanosine-3'-phosphate
  modified_base 18: mod_base = OTHER; note = 2'-deoxy-2'-fluoroadenosine-3'-phosphate
  modified_base 19: mod_base = OTHER; note = 2'-O-methylguanosine-3'-phosphate
  modified_base 20: mod_base = OTHER; note = 2'-deoxy-2'-fluoroguanosine-3'-phosphate
  modified_base 21: mod_base = OTHER; note = 2'-O-methyladenosine-3'-phosphorothioate
  modified_base 22: mod_base = OTHER; note = 2'-deoxy-2'-fluoroadenosine-3'-phosphorothioate
  modified_base 23: mod_base = OTHER; note = 2'-O-methylguanosine
tgaaggccaatttccagaggaag

SEQ ID NO: 173 - RNA, 23 nt, synthetic construct
  source 1..23: mol_type = other RNA
  modified_base 1: mod_base = OTHER; note = 2'-O-methyluridine-3'-phosphate
  modified_base 2: mod_base = OTHER; note = 2'-deoxy-2'-fluoroadenosine-3'-phosphate
  modified_base 3: mod_base = OTHER; note = 2'-O-methyluridine-3'-phosphate
  modified_base 4: mod_base = OTHER; note = 2'-deoxy-2'-fluorouridine-3'-phosphate
  modified_base 5: mod_base = OTHER; note = 2'-O-methyladenosine-3'-phosphate
  modified_base 6: mod_base = OTHER; note = 2'-deoxy-2'-fluorouridine-3'-phosphate
  modified_base 7: mod_base = OTHER; note = 2'-O-methyladenosine-3'-phosphate
  modified_base 8: mod_base = OTHER; note = 2'-deoxy-2'-fluoroadenosine-3'-phosphate
  modified_base 9: mod_base = OTHER; note = 2'-O-methyladenosine-3'-phosphate
  modified_base 10: mod_base = OTHER; note = 2'-deoxy-2'-fluoroadenosine-3'-phosphate
  modified_base 11: mod_base = OTHER; note = 2'-O-methyladenosine-3'-phosphate
  modified_base 12: mod_base = OTHER; note = 2'-O-methyluridine-3'-phosphate
  modified_base 13: mod_base = OTHER; note = 2'-O-methyladenosine-3'-phosphate
  modified_base 14: mod_base = OTHER; note = 2'-deoxy-2'-fluorouridine-3'-phosphate
  modified_base 15: mod_base = OTHER; note = 2'-O-methylcytidine-3'-phosphate
  modified_base 16: mod_base = OTHER; note = 2'-deoxy-2'-fluorouridine-3'-phosphate
  modified_base 17: mod_base = OTHER; note = 2'-O-methyluridine-3'-phosphate
  modified_base 18: mod_base = OTHER; note = 2'-deoxy-2'-fluoroguanosine-3'-phosphate
  modified_base 19: mod_base = OTHER; note = 2'-O-methylcytidine-3'-phosphate
  modified_base 20: mod_base = OTHER; note = 2'-deoxy-2'-fluorouridine-3'-phosphate
  modified_base 21: mod_base = OTHER; note = 2'-O-methyluridine-3'-phosphorothioate
  modified_base 22: mod_base = OTHER; note = 2'-deoxy-2'-fluorouridine-3'-phosphorothioate
  modified_base 23: mod_base = OTHER; note = 2'-O-methyluridine
tattataaaaatatcttgctttt

SEQ ID NO: 174 - RNA, 23 nt, synthetic construct
  source 1..23: mol_type = other RNA
  modified_base 1: mod_base = OTHER; note = 2'-O-methyluridine-3'-phosphate
  modified_base 2: mod_base = OTHER; note = 2'-deoxy-2'-fluoroguanosine-3'-phosphate
  modified_base 3: mod_base = OTHER; note = 2'-O-methyluridine-3'-phosphate
  modified_base 4: mod_base = OTHER; note = 2'-deoxy-2'-fluoroadenosine-3'-phosphate
  modified_base 5: mod_base = OTHER; note = 2'-O-methylcytidine-3'-phosphate
  modified_base 6: mod_base = OTHER; note = 2'-deoxy-2'-fluorouridine-3'-phosphate
  modified_base 7: mod_base = OTHER; note = 2'-O-methyluridine-3'-phosphate
  modified_base 8: mod_base = OTHER; note = 2'-deoxy-2'-fluoroguanosine-3'-phosphate
  modified_base 9: mod_base = OTHER; note = 2'-O-methyladenosine-3'-phosphate
  modified_base 10: mod_base = OTHER; note = 2'-deoxy-2'-fluorocytidine-3'-phosphate
  modified_base 11: mod_base = OTHER; note = 2'-O-methyladenosine-3'-phosphate
  modified_base 12: mod_base = OTHER; note = 2'-O-methyladenosine-3'-phosphate
  modified_base 13: mod_base = OTHER; note = 2'-O-methyladenosine-3'-phosphate
  modified_base 14: mod_base = OTHER; note = 2'-deoxy-2'-fluoroadenosine-3'-phosphate
  modified_base 15: mod_base = OTHER; note = 2'-O-methyladenosine-3'-phosphate
  modified_base 16: mod_base = OTHER; note = 2'-deoxy-2'-fluorocytidine-3'-phosphate
  modified_base 17: mod_base = OTHER; note = 2'-O-methyladenosine-3'-phosphate
  modified_base 18: mod_base = OTHER; note = 2'-deoxy-2'-fluorouridine-3'-phosphate
  modified_base 19: mod_base = OTHER; note = 2'-O-methyluridine-3'-phosphate
  modified_base 20: mod_base = OTHER; note = 2'-deoxy-2'-fluorouridine-3'-phosphate
  modified_base 21: mod_base = OTHER; note = 2'-O-methyluridine-3'-phosphorothioate
  modified_base 22: mod_base = OTHER; note = 2'-deoxy-2'-fluorocytidine-3'-phosphorothioate
  modified_base 23: mod_base = OTHER; note = 2'-O-methyluridine
tgtacttgacaaaaacattttct

SEQ ID NO: 175 - RNA, 23 nt, synthetic construct
  source 1..23: mol_type = other RNA
  modified_base 1: mod_base = OTHER; note = 2'-O-methyladenosine-3'-phosphate
  modified_base 2: mod_base = OTHER; note = 2'-deoxy-2'-fluoroadenosine-3'-phosphate
  modified_base 3: mod_base = OTHER; note = 2'-O-methyladenosine-3'-phosphate
  modified_base 4: mod_base = OTHER; note = 2'-deoxy-2'-fluoroguanosine-3'-phosphate
  modified_base 5: mod_base = OTHER; note = 2'-O-methylguanosine-3'-phosphate
  modified_base 6: mod_base = OTHER; note = 2'-deoxy-2'-fluorouridine-3'-phosphate
  modified_base 7: mod_base = OTHER; note = 2'-O-methyladenosine-3'-phosphate
  modified_base 8: mod_base = OTHER; note = 2'-deoxy-2'-fluorocytidine-3'-phosphate
  modified_base 9: mod_base = OTHER; note = 2'-O-methyluridine-3'-phosphate
  modified_base 10: mod_base = OTHER; note = 2'-deoxy-2'-fluorouridine-3'-phosphate
  modified_base 11: mod_base = OTHER; note = 2'-O-methylguanosine-3'-phosphate
  modified_base 12: mod_base = OTHER; note = 2'-O-methyluridine-3'-phosphate
  modified_base 13: mod_base = OTHER; note = 2'-O-methyluridine-3'-phosphate
  modified_base 14: mod_base = OTHER; note = 2'-deoxy-2'-fluoroguanosine-3'-phosphate
  modified_base 15: mod_base = OTHER; note = 2'-O-methyluridine-3'-phosphate
  modified_base 16: mod_base = OTHER; note = 2'-deoxy-2'-fluorouridine-3'-phosphate
  modified_base 17: mod_base = OTHER; note = 2'-O-methyluridine-3'-phosphate
  modified_base 18: mod_base = OTHER; note = 2'-deoxy-2'-fluoroadenosine-3'-phosphate
  modified_base 19: mod_base = OTHER; note = 2'-O-methyladenosine-3'-phosphate
  modified_base 20: mod_base = OTHER; note = 2'-deoxy-2'-fluoroadenosine-3'-phosphate
  modified_base 21: mod_base = OTHER; note = 2'-O-methyluridine-3'-phosphorothioate
  modified_base 22: mod_base = OTHER; note = 2'-deoxy-2'-fluorocytidine-3'-phosphorothioate
  modified_base 23: mod_base = OTHER; note = 2'-O-methyluridine
aaaggtacttgttgtttaaatct

SEQ ID NO: 176 - RNA, 23 nt, synthetic construct
  source 1..23: mol_type = other RNA
  modified_base 1: mod_base = OTHER; note = 2'-O-methyluridine-3'-phosphate
  modified_base 2: mod_base = OTHER; note = 2'-deoxy-2'-fluorocytidine-3'-phosphate
  modified_base 3: mod_base = OTHER; note = 2'-O-methylcytidine-3'-phosphate
  modified_base 4: mod_base = OTHER; note = 2'-deoxy-2'-fluorouridine-3'-phosphate
  modified_base 5: mod_base = OTHER; note = 2'-O-methyluridine-3'-phosphate
  modified_base 6: mod_base = OTHER; note = 2'-deoxy-2'-fluorocytidine-3'-phosphate
  modified_base 7: mod_base = OTHER; note = 2'-O-methyladenosine-3'-phosphate
  modified_base 8: mod_base = OTHER; note = 2'-deoxy-2'-fluorocytidine-3'-phosphate
  modified_base 9: mod_base = OTHER; note = 2'-O-methyladenosine-3'-phosphate
  modified_base 10: mod_base = OTHER; note = 2'-deoxy-2'-fluoroguanosine-3'-phosphate
  modified_base 11: mod_base = OTHER; note = 2'-O-methyladenosine-3'-phosphate
  modified_base 12: mod_base = OTHER; note = 2'-O-methylcytidine-3'-phosphate
  modified_base 13: mod_base = OTHER; note = 2'-O-methyluridine-3'-phosphate
  modified_base 14: mod_base = OTHER; note = 2'-deoxy-2'-fluorouridine-3'-phosphate
  modified_base 15: mod_base = OTHER; note = 2'-O-methyluridine-3'-phosphate
  modified_base 16: mod_base = OTHER; note = 2'-deoxy-2'-fluorocytidine-3'-phosphate
  modified_base 17: mod_base = OTHER; note = 2'-O-methyluridine-3'-phosphate
  modified_base 18: mod_base = OTHER; note = 2'-deoxy-2'-fluoroguanosine-3'-phosphate
  modified_base 19: mod_base = OTHER; note = 2'-O-methyladenosine-3'-phosphate
  modified_base 20: mod_base = OTHER; note = 2'-deoxy-2'-fluoroadenosine-3'-phosphate
  modified_base 21: mod_base = OTHER; note = 2'-O-methyluridine-3'-phosphorothioate
  modified_base 22: mod_base = OTHER; note = 2'-deoxy-2'-fluorouridine-3'-phosphorothioate
  modified_base 23: mod_base = OTHER; note = 2'-O-methyluridine
tccttcacagactttctgaattt

SEQ ID NO: 177 - RNA, 23 nt, synthetic construct
  source 1..23: mol_type = other RNA
  modified_base 1: mod_base = OTHER; note = 2'-O-methyluridine-3'-phosphate
  modified_base 2: mod_base = OTHER; note = 2'-deoxy-2'-fluorouridine-3'-phosphate
  modified_base 3: mod_base = OTHER; note = 2'-O-methylguanosine-3'-phosphate
  modified_base 4: mod_base = OTHER; note = 2'-deoxy-2'-fluorocytidine-3'-phosphate
  modified_base 5: mod_base = OTHER; note = 2'-O-methyladenosine-3'-phosphate
  modified_base 6: mod_base = OTHER; note = 2'-deoxy-2'-fluorouridine-3'-phosphate
  modified_base 7: mod_base = OTHER; note = 2'-O-methylcytidine-3'-phosphate
  modified_base 8: mod_base = OTHER; note = 2'-deoxy-2'-fluoroadenosine-3'-phosphate
  modified_base 9: mod_base = OTHER; note = 2'-O-methyladenosine-3'-phosphate
  modified_base 10: mod_base = OTHER; note = 2'-deoxy-2'-fluoroadenosine-3'-phosphate
  modified_base 11: mod_base = OTHER; note = 2'-O-methyluridine-3'-phosphate
  modified_base 12: mod_base = OTHER; note = 2'-O-methylguanosine-3'-phosphate
  modified_base 13: mod_base = OTHER; note = 2'-O-methylcytidine-3'-phosphate
  modified_base 14: mod_base = OTHER; note = 2'-deoxy-2'-fluorouridine-3'-phosphate
  modified_base 15: mod_base = OTHER; note = 2'-O-methyluridine-3'-phosphate
  modified_base 16: mod_base = OTHER; note = 2'-deoxy-2'-fluorocytidine-3'-phosphate
  modified_base 17: mod_base = OTHER; note = 2'-O-methyladenosine-3'-phosphate
  modified_base 18: mod_base = OTHER; note = 2'-deoxy-2'-fluoroguanosine-3'-phosphate
  modified_base 19: mod_base = OTHER; note = 2'-O-methyluridine-3'-phosphate
  modified_base 20: mod_base = OTHER; note = 2'-deoxy-2'-fluoroguanosine-3'-phosphate
  modified_base 21: mod_base = OTHER; note = 2'-O-methyluridine-3'-phosphorothioate
  modified_base 22: mod_base = OTHER; note = 2'-deoxy-2'-fluoroadenosine-3'-phosphorothioate
  modified_base 23: mod_base = OTHER; note = 2'-O-methyluridine
ttgcatcaaatgcttcagtgtat

SEQ ID NO: 178 - RNA, 23 nt, synthetic construct
  source 1..23: mol_type = other RNA
  modified_base 1: mod_base = OTHER; note = 2'-O-methylguanosine-3'-phosphate
  modified_base 2: mod_base = OTHER; note = 2'-deoxy-2'-fluoroadenosine-3'-phosphate
  modified_base 3: mod_base = OTHER; note = 2'-O-methylcytidine-3'-phosphate
  modified_base 4: mod_base = OTHER; note = 2'-deoxy-2'-fluoroadenosine-3'-phosphate
  modified_base 5: mod_base = OTHER; note = 2'-O-methyluridine-3'-phosphate
  modified_base 6: mod_base = OTHER; note = 2'-deoxy-2'-fluorouridine-3'-phosphate
  modified_base 7: mod_base = OTHER; note = 2'-O-methyluridine-3'-phosphate
  modified_base 8: mod_base = OTHER; note = 2'-deoxy-2'-fluorouridine-3'-phosphate
  modified_base 9: mod_base = OTHER; note = 2'-O-methyladenosine-3'-phosphate
  modified_base 10: mod_base = OTHER; note = 2'-deoxy-2'-fluoroadenosine-3'-phosphate
  modified_base 11: mod_base = OTHER; note = 2'-O-methylcytidine-3'-phosphate
  modified_base 12: mod_base = OTHER; note = 2'-O-methyladenosine-3'-phosphate
  modified_base 13: mod_base = OTHER; note = 2'-O-methylcytidine-3'-phosphate
  modified_base 14: mod_base = OTHER; note = 2'-deoxy-2'-fluoroadenosine-3'-phosphate
  modified_base 15: mod_base = OTHER; note = 2'-O-methylguanosine-3'-phosphate
  modified_base 16: mod_base = OTHER; note = 2'-deoxy-2'-fluoroadenosine-3'-phosphate
  modified_base 17: mod_base = OTHER; note = 2'-O-methyladenosine-3'-phosphate
  modified_base 18: mod_base = OTHER; note = 2'-deoxy-2'-fluorocytidine-3'-phosphate
  modified_base 19: mod_base = OTHER; note = 2'-O-methyluridine-3'-phosphate
  modified_base 20: mod_base = OTHER; note = 2'-deoxy-2'-fluoroguanosine-3'-phosphate
  modified_base 21: mod_base = OTHER; note = 2'-O-methylcytidine-3'-phosphorothioate
  modified_base 22: mod_base = OTHER; note = 2'-deoxy-2'-fluoroadenosine-3'-phosphorothioate
  modified_base 23: mod_base = OTHER; note = 2'-O-methyluridine
gacattttaacacagaactgcat

SEQ ID NO: 179 - RNA, 23 nt, synthetic construct
  source 1..23: mol_type = other RNA
  modified_base 1: mod_base = OTHER; note = 2'-O-methyluridine-3'-phosphate
  modified_base 2: mod_base = OTHER; note = 2'-deoxy-2'-fluorocytidine-3'-phosphate
  modified_base 3: mod_base = OTHER; note = 2'-O-methylcytidine-3'-phosphate
  modified_base 4: mod_base = OTHER; note = 2'-deoxy-2'-fluorouridine-3'-phosphate
  modified_base 5: mod_base = OTHER; note = 2'-O-methyluridine-3'-phosphate
  modified_base 6: mod_base = OTHER; note = 2'-deoxy-2'-fluorouridine-3'-phosphate
  modified_base 7: mod_base = OTHER; note = 2'-O-methyluridine-3'-phosphate
  modified_base 8: mod_base = OTHER; note = 2'-deoxy-2'-fluoroadenosine-3'-phosphate
  modified_base 9: mod_base = OTHER; note = 2'-O-methylcytidine-3'-phosphate
  modified_base 10: mod_base = OTHER; note = 2'-deoxy-2'-fluoroadenosine-3'-phosphate
  modified_base 11: mod_base = OTHER; note = 2'-O-methylcytidine-3'-phosphate
  modified_base 12: mod_base = OTHER; note = 2'-O-methyluridine-3'-phosphate
  modified_base 13: mod_base = OTHER; note = 2'-O-methylcytidine-3'-phosphate
  modified_base 14: mod_base = OTHER; note = 2'-deoxy-2'-fluoroadenosine-3'-phosphate
  modified_base 15: mod_base = OTHER; note = 2'-O-methyladenosine-3'-phosphate
  modified_base 16: mod_base = OTHER; note = 2'-deoxy-2'-fluoroadenosine-3'-phosphate
  modified_base 17: mod_base = OTHER; note = 2'-O-methyladenosine-3'-phosphate
  modified_base 18: mod_base = OTHER; note = 2'-deoxy-2'-fluorouridine-3'-phosphate
  modified_base 19: mod_base = OTHER; note = 2'-O-methylcytidine-3'-phosphate
  modified_base 20: mod_base = OTHER; note = 2'-deoxy-2'-fluorocytidine-3'-phosphate
  modified_base 21: mod_base = OTHER; note = 2'-O-methyluridine-3'-phosphorothioate
  modified_base 22: mod_base = OTHER; note = 2'-deoxy-2'-fluorouridine-3'-phosphorothioate
  modified_base 23: mod_base = OTHER; note = 2'-O-methyluridine
tccttttacactcaaaatccttt

SEQ ID NO: 180 - RNA, 23 nt, synthetic construct
  source 1..23: mol_type = other RNA
  modified_base 1: mod_base = OTHER; note = 2'-O-methyluridine-3'-phosphate
  modified_base 2: mod_base = OTHER; note = 2'-deoxy-2'-fluorouridine-3'-phosphate
  modified_base 3: mod_base = OTHER; note = 2'-O-methylcytidine-3'-phosphate
  modified_base 4: mod_base = OTHER; note = 2'-deoxy-2'-fluorouridine-3'-phosphate
  modified_base 5: mod_base = OTHER; note = 2'-O-methyluridine-3'-phosphate
  modified_base 6: mod_base = OTHER; note = 2'-deoxy-2'-fluorouridine-3'-phosphate
  modified_base 7: mod_base = OTHER; note = 2'-O-methyladenosine-3'-phosphate
  modified_base 8: mod_base = OTHER; note = 2'-deoxy-2'-fluorocytidine-3'-phosphate
  modified_base 9: mod_base = OTHER; note = 2'-O-methyladenosine-3'-phosphate
  modified_base 10: mod_base = OTHER; note = 2'-deoxy-2'-fluoroadenosine-3'-phosphate
  modified_base 11: mod_base = OTHER; note = 2'-O-methylguanosine-3'-phosphate
  modified_base 12: mod_base = OTHER; note = 2'-O-methylguanosine-3'-phosphate
  modified_base 13: mod_base = OTHER; note = 2'-O-methyluridine-3'-phosphate
  modified_base 14: mod_base = OTHER; note = 2'-deoxy-2'-fluorouridine-3'-phosphate
  modified_base 15: mod_base = OTHER; note = 2'-O-methylcytidine-3'-phosphate
  modified_base 16: mod_base = OTHER; note = 2'-deoxy-2'-fluoroadenosine-3'-phosphate
  modified_base 17: mod_base = OTHER; note = 2'-O-methyluridine-3'-phosphate
  modified_base 18: mod_base = OTHER; note = 2'-deoxy-2'-fluorocytidine-3'-phosphate
  modified_base 19: mod_base = OTHER; note = 2'-O-methyladenosine-3'-phosphate
  modified_base 20: mod_base = OTHER; note = 2'-deoxy-2'-fluorouridine-3'-phosphate
  modified_base 21: mod_base = OTHER; note = 2'-O-methyluridine-3'-phosphorothioate
  modified_base 22: mod_base = OTHER; note = 2'-deoxy-2'-fluorouridine-3'-phosphorothioate
  modified_base 23: mod_base = OTHER; note = 2'-O-methyluridine
ttctttacaaggttcatcatttt

SEQ ID NO: 181 - RNA, 23 nt, synthetic construct
  source 1..23: mol_type = other RNA
  modified_base 1: mod_base = OTHER; note = 2'-O-methyladenosine-3'-phosphate
  modified_base 2: mod_base = OTHER; note = 2'-deoxy-2'-fluoroadenosine-3'-phosphate
  modified_base 3: mod_base = OTHER; note = 2'-O-methyluridine-3'-phosphate
  modified_base 4: mod_base = OTHER; note = 2'-deoxy-2'-fluoroguanosine-3'-phosphate
  modified_base 5: mod_base = OTHER; note = 2'-O-methyladenosine-3'-phosphate
  modified_base 6: mod_base = OTHER; note = 2'-deoxy-2'-fluoroadenosine-3'-phosphate
  modified_base 7: mod_base = OTHER; note = 2'-O-methyladenosine-3'-phosphate
  modified_base 8: mod_base = OTHER; note = 2'-deoxy-2'-fluoroadenosine-3'-phosphate
  modified_base 9: mod_base = OTHER; note = 2'-O-methyladenosine-3'-phosphate
  modified_base 10: mod_base = OTHER; note = 2'-deoxy-2'-fluorouridine-3'-phosphate
  modified_base 11: mod_base = OTHER; note = 2'-O-methylguanosine-3'-phosphate
  modified_base 12: mod_base = OTHER; note = 2'-O-methyluridine-3'-phosphate
  modified_base 13: mod_base = OTHER; note = 2'-O-methyluridine-3'-phosphate
  modified_base 14: mod_base = OTHER; note = 2'-deoxy-2'-fluorocytidine-3'-phosphate
  modified_base 15: mod_base = OTHER; note = 2'-O-methylcytidine-3'-phosphate
  modified_base 16: mod_base = OTHER; note = 2'-deoxy-2'-fluoroadenosine-3'-phosphate
  modified_base 17: mod_base = OTHER; note = 2'-O-methyladenosine-3'-phosphate
  modified_base 18: mod_base = OTHER; note = 2'-deoxy-2'-fluorouridine-3'-phosphate
  modified_base 19: mod_base = OTHER; note = 2'-O-methylguanosine-3'-phosphate
  modified_base 20: mod_base = OTHER; note = 2'-deoxy-2'-fluoroadenosine-3'-phosphate
  modified_base 21: mod_base = OTHER; note = 2'-O-methyluridine-3'-phosphorothioate
  modified_base 22: mod_base = OTHER; note = 2'-deoxy-2'-fluorouridine-3'-phosphorothioate
  modified_base 23: mod_base = OTHER; note = 2'-O-methyluridine
aatgaaaaatgttccaatgattt

SEQ ID NO: 182 - RNA, 23 nt, synthetic construct
  source 1..23: mol_type = other RNA
  modified_base 1: mod_base = OTHER; note = 2'-O-methyladenosine-3'-phosphate
  modified_base 2: mod_base = OTHER; note = 2'-deoxy-2'-fluoroadenosine-3'-phosphate
  modified_base 3: mod_base = OTHER; note = 2'-O-methyluridine-3'-phosphate
  modified_base 4: mod_base = OTHER; note = 2'-deoxy-2'-fluoroadenosine-3'-phosphate
  modified_base 5: mod_base = OTHER; note = 2'-O-methyladenosine-3'-phosphate
  modified_base 6: mod_base = OTHER; note = 2'-deoxy-2'-fluorocytidine-3'-phosphate
  modified_base 7: mod_base = OTHER; note = 2'-O-methyluridine-3'-phosphate
  modified_base 8: mod_base = OTHER; note = 2'-deoxy-2'-fluorocytidine-3'-phosphate
  modified_base 9: mod_base = OTHER; note = 2'-O-methylcytidine-3'-phosphate
  modified_base 10: mod_base = OTHER; note = 2'-deoxy-2'-fluoroguanosine-3'-phosphate
  modified_base 11: mod_base = OTHER; note = 2'-O-methyladenosine-3'-phosphate
  modified_base 12: mod_base = OTHER; note = 2'-O-methyladenosine-3'-phosphate
  modified_base 13: mod_base = OTHER; note = 2'-O-methyluridine-3'-phosphate
  modified_base 14: mod_base = OTHER; note = 2'-deoxy-2'-fluorouridine-3'-phosphate
  modified_base 15: mod_base = OTHER; note = 2'-O-methyluridine-3'-phosphate
  modified_base 16: mod_base = OTHER; note = 2'-deoxy-2'-fluorocytidine-3'-phosphate
  modified_base 17: mod_base = OTHER; note = 2'-O-methyluridine-3'-phosphate
  modified_base 18: mod_base = OTHER; note = 2'-deoxy-2'-fluoroguanosine-3'-phosphate
  modified_base 19: mod_base = OTHER; note = 2'-O-methylguanosine-3'-phosphate
  modified_base 20: mod_base = OTHER; note = 2'-deoxy-2'-fluorocytidine-3'-phosphate
  modified_base 21: mod_base = OTHER; note = 2'-O-methyluridine-3'-phosphorothioate
  modified_base 22: mod_base = OTHER; note = 2'-deoxy-2'-fluorouridine-3'-phosphorothioate
  modified_base 23: mod_base = OTHER; note = 2'-O-methylguanosine
aataactccgaatttctggcttg

SEQ ID NO: 183 - RNA, 23 nt, synthetic construct
  source 1..23: mol_type = other RNA
  modified_base 1: mod_base = OTHER; note = 2'-O-methylguanosine-3'-phosphate
  modified_base 2: mod_base = OTHER; note = 2'-deoxy-2'-fluorouridine-3'-phosphate
  modified_base 3: mod_base = OTHER; note = 2'-O-methylguanosine-3'-phosphate
  modified_base 4: mod_base = OTHER; note = 2'-deoxy-2'-fluoroadenosine-3'-phosphate
  modified_base 5: mod_base = OTHER; note = 2'-O-methylguanosine-3'-phosphate
  modified_base 6: mod_base = OTHER; note = 2'-deoxy-2'-fluorouridine-3'-phosphate
  modified_base 7: mod_base = OTHER; note = 2'-O-methyluridine-3'-phosphate
  modified_base 8: mod_base = OTHER; note = 2'-deoxy-2'-fluorouridine-3'-phosphate
  modified_base 9: mod_base = OTHER; note = 2'-O-methyluridine-3'-phosphate
  modified_base 10: mod_base = OTHER; note = 2'-deoxy-2'-fluoroadenosine-3'-phosphate
  modified_base 11: mod_base = OTHER; note = 2'-O-methyluridine-3'-phosphate
  modified_base 12: mod_base = OTHER; note = 2'-O-methylcytidine-3'-phosphate
  modified_base 13: mod_base = OTHER; note = 2'-O-methyluridine-3'-phosphate
  modified_base 14: mod_base = OTHER; note = 2'-deoxy-2'-fluorocytidine-3'-phosphate
  modified_base 15: mod_base = OTHER; note = 2'-O-methylcytidine-3'-phosphate
  modified_base 16: mod_base = OTHER; note = 2'-deoxy-2'-fluorocytidine-3'-phosphate
  modified_base 17: mod_base = OTHER; note = 2'-O-methyladenosine-3'-phosphate
  modified_base 18: mod_base = OTHER; note = 2'-deoxy-2'-fluoroguanosine-3'-phosphate
  modified_base 19: mod_base = OTHER; note = 2'-O-methylguanosine-3'-phosphate
  modified_base 20: mod_base = OTHER; note = 2'-deoxy-2'-fluoroguanosine-3'-phosphate
  modified_base 21: mod_base = OTHER; note = 2'-O-methyladenosine-3'-phosphorothioate
  modified_base 22: mod_base = OTHER; note = 2'-deoxy-2'-fluoroadenosine-3'-phosphorothioate
  modified_base 23: mod_base = OTHER; note = 2'-O-methyladenosine
gtgagttttatctcccagggaaa

SEQ ID NO: 184 - RNA, 23 nt, synthetic construct
  source 1..23: mol_type = other RNA
  modified_base 1: mod_base = OTHER; note = 2'-O-methyluridine-3'-phosphate
  modified_base 2: mod_base = OTHER; note = 2'-deoxy-2'-fluorouridine-3'-phosphate
  modified_base 3: mod_base = OTHER; note = 2'-O-methyluridine-3'-phosphate
  modified_base 4: mod_base = OTHER; note = 2'-deoxy-2'-fluoroadenosine-3'-phosphate
  modified_base 5: mod_base = OTHER; note = 2'-O-methylcytidine-3'-phosphate
  modified_base 6: mod_base = OTHER; note = 2'-deoxy-2'-fluoroadenosine-3'-phosphate
  modified_base 7: mod_base = OTHER; note = 2'-O-methyladenosine-3'-phosphate
  modified_base 8: mod_base = OTHER; note = 2'-deoxy-2'-fluoroguanosine-3'-phosphate
  modified_base 9: mod_base = OTHER; note = 2'-O-methylguanosine-3'-phosphate
  modified_base 10: mod_base = OTHER; note = 2'-deoxy-2'-fluorouridine-3'-phosphate
  modified_base 11: mod_base = OTHER; note = 2'-O-methyluridine-3'-phosphate
  modified_base 12: mod_base = OTHER; note = 2'-O-methylcytidine-3'-phosphate
  modified_base 13: mod_base = OTHER; note = 2'-O-methyladenosine-3'-phosphate
  modified_base 14: mod_base = OTHER; note = 2'-deoxy-2'-fluorouridine-3'-phosphate
  modified_base 15: mod_base = OTHER; note = 2'-O-methylcytidine-3'-phosphate
  modified_base 16: mod_base = OTHER; note = 2'-deoxy-2'-fluoroadenosine-3'-phosphate
  modified_base 17: mod_base = OTHER; note = 2'-O-methyluridine-3'-phosphate
  modified_base 18: mod_base = OTHER; note = 2'-deoxy-2'-fluorouridine-3'-phosphate
  modified_base 19: mod_base = OTHER; note = 2'-O-methyluridine-3'-phosphate
  modified_base 20: mod_base = OTHER; note = 2'-deoxy-2'-fluorouridine-3'-phosphate
  modified_base 21: mod_base = OTHER; note = 2'-O-methylcytidine-3'-phosphorothioate
  modified_base 22: mod_base = OTHER; note = 2'-deoxy-2'-fluorouridine-3'-phosphorothioate
  modified_base 23: mod_base = OTHER; note = 2'-O-methyluridine
tttacaaggttcatcattttctt

SEQ ID NO: 185 - RNA, 23 nt, synthetic construct
  source 1..23: mol_type = other RNA
  modified_base 1: mod_base = OTHER; note = 2'-O-methyladenosine-3'-phosphate
  modified_base 2: mod_base = OTHER; note = 2'-deoxy-2'-fluorouridine-3'-phosphate
  modified_base 3: mod_base = OTHER; note = 2'-O-methylcytidine-3'-phosphate
  modified_base 4: mod_base = OTHER; note = 2'-deoxy-2'-fluoroadenosine-3'-phosphate
  modified_base 5: mod_base = OTHER; note = 2'-O-methyladenosine-3'-phosphate
  modified_base 6: mod_base = OTHER; note = 2'-deoxy-2'-fluoroadenosine-3'-phosphate
  modified_base 7: mod_base = OTHER; note = 2'-O-methyluridine-3'-phosphate
  modified_base 8: mod_base = OTHER; note = 2'-deoxy-2'-fluoroguanosine-3'-phosphate
  modified_base 9: mod_base = OTHER; note = 2'-O-methyluridine-3'-phosphate
  modified_base 10: mod_base = OTHER; note = 2'-deoxy-2'-fluoroguanosine-3'-phosphate
  modified_base 11: mod_base = OTHER; note = 2'-O-methyladenosine-3'-phosphate
  modified_base 12: mod_base = OTHER; note = 2'-O-methylcytidine-3'-phosphate
  modified_base 13: mod_base = OTHER; note = 2'-O-methyluridine-3'-phosphate
  modified_base 14: mod_base = OTHER; note = 2'-deoxy-2'-fluorouridine-3'-phosphate
  modified_base 15: mod_base = OTHER; note = 2'-O-methylguanosine-3'-phosphate
  modified_base 16: mod_base = OTHER; note = 2'-deoxy-2'-fluoroadenosine-3'-phosphate
  modified_base 17: mod_base = OTHER; note = 2'-O-methylguanosine-3'-phosphate
  modified_base 18: mod_base = OTHER; note = 2'-deoxy-2'-fluorocytidine-3'-phosphate
  modified_base 19: mod_base = OTHER; note = 2'-O-methyladenosine-3'-phosphate
  modified_base 20: mod_base = OTHER; note = 2'-deoxy-2'-fluoroadenosine-3'-phosphate
  modified_base 21: mod_base = OTHER; note = 2'-O-methyluridine-3'-phosphorothioate
  modified_base 22: mod_base = OTHER; note = 2'-deoxy-2'-fluorouridine-3'-phosphorothioate
  modified_base 23: mod_base = OTHER; note = 2'-O-methylcytidine
atcaaatgtgacttgagcaattc

SEQ ID NO: 186 - RNA, 23 nt, synthetic construct
  source 1..23: mol_type = other RNA
  modified_base 1: mod_base = OTHER; note = 2'-O-methyluridine-3'-phosphate
  modified_base 2: mod_base = OTHER; note = 2'-deoxy-2'-fluorouridine-3'-phosphate
  modified_base 3: mod_base = OTHER; note = 2'-O-methyluridine-3'-phosphate
  modified_base 4: mod_base = OTHER; note = 2'-deoxy-2'-fluoroadenosine-3'-phosphate
  modified_base 5: mod_base = OTHER; note = 2'-O-methyluridine-3'-phosphate
  modified_base 6: mod_base = OTHER; note = 2'-deoxy-2'-fluoroadenosine-3'-phosphate
  modified_base 7: mod_base = OTHER; note = 2'-O-methyladenosine-3'-phosphate
  modified_base 8: mod_base = OTHER; note = 2'-deoxy-2'-fluoroguanosine-3'-phosphate
  modified_base 9: mod_base = OTHER; note = 2'-O-methylcytidine-3'-phosphate
  modified_base 10: mod_base = OTHER; note = 2'-deoxy-2'-fluoroadenosine-3'-phosphate
  modified_base 11: mod_base = OTHER; note = 2'-O-methyluridine-3'-phosphate
  modified_base 12: mod_base = OTHER; note = 2'-O-methyladenosine-3'-phosphate
  modified_base 13: mod_base = OTHER; note = 2'-O-methyluridine-3'-phosphate
  modified_base 14: mod_base = OTHER; note = 2'-deoxy-2'-fluoroguanosine-3'-phosphate
  modified_base 15: mod_base = OTHER; note = 2'-O-methylcytidine-3'-phosphate
  modified_base 16: mod_base = OTHER; note = 2'-deoxy-2'-fluoroadenosine-3'-phosphate
  modified_base 17: mod_base = OTHER; note = 2'-O-methyladenosine-3'-phosphate
  modified_base 18: mod_base = OTHER; note = 2'-deoxy-2'-fluorouridine-3'-phosphate
  modified_base 19: mod_base = OTHER; note = 2'-O-methylcytidine-3'-phosphate
  modified_base 20: mod_base = OTHER; note = 2'-deoxy-2'-fluorouridine-3'-phosphate
  modified_base 21: mod_base = OTHER; note = 2'-O-methylcytidine-3'-phosphorothioate
  modified_base 22: mod_base = OTHER; note = 2'-deoxy-2'-fluorouridine-3'-phosphorothioate
  modified_base 23: mod_base = OTHER; note = 2'-O-methylguanosine
tttataagcatatgcaatctctg

SEQ ID NO: 187 - RNA, 23 nt, synthetic construct
  source 1..23: mol_type = other RNA
  modified_base 1: mod_base = OTHER; note = 2'-O-methyluridine-3'-phosphate
  modified_base 2: mod_base = OTHER; note = 2'-deoxy-2'-fluoroadenosine-3'-phosphate
  modified_base 3: mod_base = OTHER; note = 2'-O-methyladenosine-3'-phosphate
  modified_base 4: mod_base = OTHER; note = 2'-deoxy-2'-fluoroadenosine-3'-phosphate
  modified_base 5: mod_base = OTHER; note = 2'-O-methyluridine-3'-phosphate
  modified_base 6: mod_base = OTHER; note = 2'-deoxy-2'-fluorouridine-3'-phosphate
  modified_base 7: mod_base = OTHER; note = 2'-O-methyluridine-3'-phosphate
  modified_base 8: mod_base = OTHER; note = 2'-deoxy-2'-fluorouridine-3'-phosphate
  modified_base 9: mod_base = OTHER; note = 2'-O-methyluridine-3'-phosphate
  modified_base 10: mod_base = OTHER; note = 2'-deoxy-2'-fluorouridine-3'-phosphate
  modified_base 11: mod_base = OTHER; note = 2'-O-methyladenosine-3'-phosphate
  modified_base 12: mod_base = OTHER; note = 2'-O-methyluridine-3'-phosphate
  modified_base 13: mod_base = OTHER; note = 2'-O-methylcytidine-3'-phosphate
  modified_base 14: mod_base = OTHER; note = 2'-deoxy-2'-fluoroadenosine-3'-phosphate
  modified_base 15: mod_base = OTHER; note = 2'-O-methylguanosine-3'-phosphate
  modified_base 16: mod_base = OTHER; note = 2'-deoxy-2'-fluoroguanosine-3'-phosphate
  modified_base 17: mod_base = OTHER; note = 2'-O-methyladenosine-3'-phosphate
  modified_base 18: mod_base = OTHER; note = 2'-deoxy-2'-fluorouridine-3'-phosphate
  modified_base 19: mod_base = OTHER; note = 2'-O-methyladenosine-3'-phosphate
  modified_base 20: mod_base = OTHER; note = 2'-deoxy-2'-fluoroadenosine-3'-phosphate
  modified_base 21: mod_base = OTHER; note = 2'-O-methylcytidine-3'-phosphorothioate
  modified_base 22: mod_base = OTHER; note = 2'-deoxy-2'-fluorouridine-3'-phosphorothioate
  modified_base 23: mod_base = OTHER; note = 2'-O-methyluridine
taaattttttatcaggataactt

SEQ ID NO: 188 - RNA, 23 nt, synthetic construct
  source 1..23: mol_type = other RNA
  modified_base 1: mod_base = OTHER; note = 2'-O-methyladenosine-3'-phosphate
  modified_base 2: mod_base = OTHER; note = 2'-deoxy-2'-fluoroadenosine-3'-phosphate
  modified_base 3: mod_base = OTHER; note = 2'-O-methyluridine-3'-phosphate
  modified_base 4: mod_base = OTHER; note = 2'-deoxy-2'-fluoroadenosine-3'-phosphate
  modified_base 5: mod_base = OTHER; note = 2'-O-methyladenosine-3'-phosphate
  modified_base 6: mod_base = OTHER; note = 2'-deoxy-2'-fluoroadenosine-3'-phosphate
  modified_base 7: mod_base = OTHER; note = 2'-O-methyladenosine-3'-phosphate
  modified_base 8: mod_base = OTHER; note = 2'-deoxy-2'-fluoroguanosine-3'-phosphate
  modified_base 9: mod_base = OTHER; note = 2'-O-methylcytidine-3'-phosphate
  modified_base 10: mod_base = OTHER; note = 2'-deoxy-2'-fluorouridine-3'-phosphate
  modified_base 11: mod_base = OTHER; note = 2'-O-methylguanosine-3'-phosphate
  modified_base 12: mod_base = OTHER; note = 2'-O-methylcytidine-3'-phosphate
  modified_base 13: mod_base = OTHER; note = 2'-O-methyladenosine-3'-phosphate
  modified_base 14: mod_base = OTHER; note = 2'-deoxy-2'-fluoroadenosine-3'-phosphate
  modified_base 15: mod_base = OTHER; note = 2'-O-methyladenosine-3'-phosphate
  modified_base 16: mod_base = OTHER; note = 2'-deoxy-2'-fluorocytidine-3'-phosphate
  modified_base 17: mod_base = OTHER; note = 2'-O-methyluridine-3'-phosphate
  modified_base 18: mod_base = OTHER; note = 2'-deoxy-2'-fluorouridine-3'-phosphate
  modified_base 19: mod_base = OTHER; note = 2'-O-methylcytidine-3'-phosphate
  modified_base 20: mod_base = OTHER; note = 2'-deoxy-2'-fluorocytidine-3'-phosphate
  modified_base 21: mod_base = OTHER; note = 2'-O-methyluridine-3'-phosphorothioate
  modified_base 22: mod_base = OTHER; note = 2'-deoxy-2'-fluorocytidine-3'-phosphorothioate
  modified_base 23: mod_base = OTHER; note = 2'-O-methyladenosine
aataaaagctgcaaacttcctca

SEQ ID NO: 189 - RNA, 23 nt, synthetic construct
  source 1..23: mol_type = other RNA
  modified_base 1: mod_base = OTHER; note = 2'-O-methyluridine-3'-phosphate
  modified_base 2: mod_base = OTHER; note = 2'-deoxy-2'-fluorocytidine-3'-phosphate
  modified_base 3: mod_base = OTHER; note = 2'-O-methylcytidine-3'-phosphate
  modified_base 4: mod_base = OTHER; note = 2'-deoxy-2'-fluoroadenosine-3'-phosphate
  modified_base 5: mod_base = OTHER; note = 2'-O-methyladenosine-3'-phosphate
  modified_base 6: mod_base = OTHER; note = 2'-deoxy-2'-fluorouridine-3'-phosphate
  modified_base 7: mod_base = OTHER; note = 2'-O-methyladenosine-3'-phosphate
  modified_base 8: mod_base = OTHER; note = 2'-deoxy-2'-fluorouridine-3'-phosphate
  modified_base 9: mod_base = OTHER; note = 2'-O-methylguanosine-3'-phosphate
  modified_base 10: mod_base = OTHER; note = 2'-deoxy-2'-fluoroadenosine-3'-phosphate
  modified_base 11: mod_base = OTHER; note = 2'-O-methyluridine-3'-phosphate
  modified_base 12: mod_base = OTHER; note = 2'-O-methylcytidine-3'-phosphate
  modified_base 13: mod_base = OTHER; note = 2'-O-methyladenosine-3'-phosphate
  modified_base 14: mod_base = OTHER; note = 2'-deoxy-2'-fluoroadenosine-3'-phosphate
  modified_base 15: mod_base = OTHER; note = 2'-O-methyluridine-3'-phosphate
  modified_base 16: mod_base = OTHER; note = 2'-deoxy-2'-fluorouridine-3'-phosphate
  modified_base 17: mod_base = OTHER; note = 2'-O-methyluridine-3'-phosphate
  modified_base 18: mod_base = OTHER; note = 2'-deoxy-2'-fluorocytidine-3'-phosphate
  modified_base 19: mod_base = OTHER; note = 2'-O-methyluridine-3'-phosphate
  modified_base 20: mod_base = OTHER; note = 2'-deoxy-2'-fluorouridine-3'-phosphate
  modified_base 21: mod_base = OTHER; note = 2'-O-methylcytidine-3'-phosphorothioate
  modified_base 22: mod_base = OTHER; note = 2'-deoxy-2'-fluorouridine-3'-phosphorothioate
  modified_base 23: mod_base = OTHER; note = 2'-O-methyladenosine
tccaatatgatcaatttcttcta

SEQ ID NO: 190 - RNA, 23 nt, synthetic construct
  source 1..23: mol_type = other RNA
  modified_base 1: mod_base = OTHER; note = 2'-O-methyladenosine-3'-phosphate
  modified_base 2: mod_base = OTHER; note = 2'-deoxy-2'-fluoroadenosine-3'-phosphate
  modified_base 3: mod_base = OTHER; note = 2'-O-methylcytidine-3'-phosphate
  modified_base 4: mod_base = OTHER; note = 2'-deoxy-2'-fluorouridine-3'-phosphate
  modified_base 5: mod_base = OTHER; note = 2'-O-methyladenosine-3'-phosphate
  modified_base 6: mod_base = OTHER; note = 2'-deoxy-2'-fluoroadenosine-3'-phosphate
  modified_base 7: mod_base = OTHER; note = 2'-O-methyladenosine-3'-phosphate
  modified_base 8: mod_base = OTHER; note = 2'-deoxy-2'-fluorouridine-3'-phosphate
  modified_base 9: mod_base = OTHER; note = 2'-O-methyluridine-3'-phosphate
  modified_base 10: mod_base = OTHER; note = 2'-deoxy-2'-fluorouridine-3'-phosphate
  modified_base 11: mod_base = OTHER; note = 2'-O-methyluridine-3'-phosphate
  modified_base 12: mod_base = OTHER; note = 2'-O-methyluridine-3'-phosphate
  modified_base 13: mod_base = OTHER; note = 2'-O-methyluridine-3'-phosphate
  modified_base 14: mod_base = OTHER; note = 2'-deoxy-2'-fluoroadenosine-3'-phosphate
  modified_base 15: mod_base = OTHER; note = 2'-O-methyluridine-3'-phosphate
  modified_base 16: mod_base = OTHER; note = 2'-deoxy-2'-fluorocytidine-3'-phosphate
  modified_base 17: mod_base = OTHER; note = 2'-O-methyladenosine-3'-phosphate
  modified_base 18: mod_base = OTHER; note = 2'-deoxy-2'-fluoroguanosine-3'-phosphate
  modified_base 19: mod_base = OTHER; note = 2'-O-methylguanosine-3'-phosphate
  modified_base 20: mod_base = OTHER; note = 2'-deoxy-2'-fluoroadenosine-3'-phosphate
  modified_base 21: mod_base = OTHER; note = 2'-O-methyluridine-3'-phosphorothioate
  modified_base 22: mod_base = OTHER; note = 2'-deoxy-2'-fluoroadenosine-3'-phosphorothioate
  modified_base 23: mod_base = OTHER; note = 2'-O-methyladenosine
aactaaattttttatcaggataa

SEQ ID NO: 191 - RNA, 23 nt, synthetic construct
  source 1..23: mol_type = other RNA
  modified_base 1: mod_base = OTHER; note = 2'-O-methyluridine-3'-phosphate
  modified_base 2: mod_base = OTHER; note = 2'-deoxy-2'-fluorouridine-3'-phosphate
  modified_base 3: mod_base = OTHER; note = 2'-O-methyluridine-3'-phosphate
  modified_base 4: mod_base = OTHER; note = 2'-deoxy-2'-fluoroadenosine-3'-phosphate
  modified_base 5: mod_base = OTHER; note = 2'-O-methylcytidine-3'-phosphate
  modified_base 6: mod_base = OTHER; note = 2'-deoxy-2'-fluorouridine-3'-phosphate
  modified_base 7: mod_base = OTHER; note = 2'-O-methyladenosine-3'-phosphate
  modified_base 8: mod_base = OTHER; note = 2'-deoxy-2'-fluoroadenosine-3'-phosphate
  modified_base 9: mod_base = OTHER; note = 2'-O-methylguanosine-3'-phosphate
  modified_base 10: mod_base = OTHER; note = 2'-deoxy-2'-fluoroadenosine-3'-phosphate
  modified_base 11: mod_base = OTHER; note = 2'-O-methyluridine-3'-phosphate
  modified_base 12: mod_base = OTHER; note = 2'-O-methyluridine-3'-phosphate
  modified_base 13: mod_base = OTHER; note = 2'-O-methyluridine-3'-phosphate
  modified_base 14: mod_base = OTHER; note = 2'-deoxy-2'-fluorocytidine-3'-phosphate
  modified_base 15: mod_base = OTHER; note = 2'-O-methyluridine-3'-phosphate
  modified_base 16: mod_base = OTHER; note = 2'-deoxy-2'-fluorouridine-3'-phosphate
  modified_base 17: mod_base = OTHER; note = 2'-O-methyluridine-3'-phosphate
  modified_base 18: mod_base = OTHER; note = 2'-deoxy-2'-fluorouridine-3'-phosphate
  modified_base 19: mod_base = OTHER; note = 2'-O-methylcytidine-3'-phosphate
  modified_base 20: mod_base = OTHER; note = 2'-deoxy-2'-fluorocytidine-3'-phosphate
  modified_base 21: mod_base = OTHER; note = 2'-O-methyladenosine-3'-phosphorothioate
  modified_base 22: mod_base = OTHER; note = 2'-deoxy-2'-fluoroadenosine-3'-phosphorothioate
  modified_base 23: mod_base = OTHER; note = 2'-O-methyladenosine
tttactaagatttcttttccaaa

SEQ ID NO: 192 - RNA, 23 nt, synthetic construct
  source 1..23: mol_type = other RNA
  modified_base 1: mod_base = OTHER; note = 2'-O-methyladenosine-3'-phosphate
  modified_base 2: mod_base = OTHER; note = 2'-deoxy-2'-fluoroadenosine-3'-phosphate
  modified_base 3: mod_base = OTHER; note = 2'-O-methyluridine-3'-phosphate
  modified_base 4: mod_base = OTHER; note = 2'-deoxy-2'-fluoroguanosine-3'-phosphate
  modified_base 5: mod_base = OTHER; note = 2'-O-methyluridine-3'-phosphate
  modified_base 6: mod_base = OTHER; note = 2'-deoxy-2'-fluorouridine-3'-phosphate
  modified_base 7: mod_base = OTHER; note = 2'-O-methyluridine-3'-phosphate
  modified_base 8: mod_base = OTHER; note = 2'-deoxy-2'-fluoroadenosine-3'-phosphate
  modified_base 9: mod_base = OTHER; note = 2'-O-methyluridine-3'-phosphate
  modified_base 10: mod_base = OTHER; note = 2'-deoxy-2'-fluoroadenosine-3'-phosphate
  modified_base 11: mod_base = OTHER; note = 2'-O-methylcytidine-3'-phosphate
  modified_base 12: mod_base = OTHER; note = 2'-O-methyluridine-3'-phosphate
  modified_base 13: mod_base = OTHER; note = 2'-O-methyluridine-3'-phosphate
  modified_base 14: mod_base = OTHER; note = 2'-deoxy-2'-fluorouridine-3'-phosphate
  modified_base 15: mod_base = OTHER; note = 2'-O-methylguanosine-3'-phosphate
  modified_base 16: mod_base = OTHER; note = 2'-deoxy-2'-fluoroadenosine-3'-phosphate
  modified_base 17: mod_base = OTHER; note = 2'-O-methyluridine-3'-phosphate
  modified_base 18: mod_base = OTHER; note = 2'-deoxy-2'-fluoroadenosine-3'-phosphate
  modified_base 19: mod_base = OTHER; note = 2'-O-methyladenosine-3'-phosphate
  modified_base 20: mod_base = OTHER; note = 2'-deoxy-2'-fluoroguanosine-3'-phosphate
  modified_base 21: mod_base = OTHER; note = 2'-O-methyladenosine-3'-phosphorothioate
  modified_base 22: mod_base = OTHER; note = 2'-deoxy-2'-fluorouridine-3'-phosphorothioate
  modified_base 23: mod_base = OTHER; note = 2'-O-methylguanosine
aatgtttatactttgataagatg

SEQ ID NO: 193 - RNA, 23 nt, synthetic construct
  source 1..23: mol_type = other RNA
  modified_base 1: mod_base = OTHER; note = 2'-O-methyladenosine-3'-phosphate
  modified_base 2: mod_base = OTHER; note = 2'-deoxy-2'-fluorocytidine-3'-phosphate
  modified_base 3: mod_base = OTHER; note = 2'-O-methylcytidine-3'-phosphate
  modified_base 4: mod_base = OTHER; note = 2'-deoxy-2'-fluoroadenosine-3'-phosphate
  modified_base 5: mod_base = OTHER; note = 2'-O-methyladenosine-3'-phosphate
  modified_base 6: mod_base = OTHER; note = 2'-deoxy-2'-fluoroadenosine-3'-phosphate
  modified_base 7: mod_base = OTHER; note = 2'-O-methyluridine-3'-phosphate
  modified_base 8: mod_base = OTHER; note = 2'-deoxy-2'-fluorouridine-3'-phosphate
  modified_base 9: mod_base = OTHER; note = 2'-O-methylcytidine-3'-phosphate
  modified_base 10: mod_base = OTHER; note = 2'-deoxy-2'-fluoroadenosine-3'-phosphate
  modified_base 11: mod_base = OTHER; note = 2'-O-methylguanosine-3'-phosphate
  modified_base 12: mod_base = OTHER; note = 2'-O-methyluridine-3'-phosphate
  modified_base 13: mod_base = OTHER; note = 2'-O-methyluridine-3'-phosphate
  modified_base 14: mod_base = OTHER; note = 2'-deoxy-2'-fluorouridine-3'-phosphate
  modified_base 15: mod_base = OTHER; note = 2'-O-methylguanosine-3'-phosphate
  modified_base 16: mod_base = OTHER; note = 2'-deoxy-2'-fluorouridine-3'-phosphate
  modified_base 17: mod_base = OTHER; note = 2'-O-methyladenosine-3'-phosphate
  modified_base 18: mod_base = OTHER; note = 2'-deoxy-2'-fluoroguanosine-3'-phosphate
  modified_base 19: mod_base = OTHER; note = 2'-O-methylguanosine-3'-phosphate
  modified_base 20: mod_base = OTHER; note = 2'-deoxy-2'-fluoroguanosine-3'-phosphate
  modified_base 21: mod_base = OTHER; note = 2'-O-methyladenosine-3'-phosphorothioate
  modified_base 22: mod_base = OTHER; note = 2'-deoxy-2'-fluoroguanosine-3'-phosphorothioate
  modified_base 23: mod_base = OTHER; note = 2'-O-methyladenosine
accaaattcagtttgtagggaga

SEQ ID NO: 194 - RNA, 23 nt, synthetic construct
  source 1..23: mol_type = other RNA
  modified_base 1: mod_base = OTHER; note = 2'-O-methyladenosine-3'-phosphate
  modified_base 2: mod_base = OTHER; note = 2'-deoxy-2'-fluoroadenosine-3'-phosphate
  modified_base 3: mod_base = OTHER; note = 2'-O-methyluridine-3'-phosphate
  modified_base 4: mod_base = OTHER; note = 2'-deoxy-2'-fluoroguanosine-3'-phosphate
  modified_base 5: mod_base = OTHER; note = 2'-O-methyladenosine-3'-phosphate
  modified_base 6: mod_base = OTHER; note = 2'-deoxy-2'-fluorocytidine-3'-phosphate
  modified_base 7: mod_base = OTHER; note = 2'-O-methyladenosine-3'-phosphate
  modified_base 8: mod_base = OTHER; note = 2'-deoxy-2'-fluorouridine-3'-phosphate
  modified_base 9: mod_base = OTHER; note = 2'-O-methyladenosine-3'-phosphate
  modified_base 10: mod_base = OTHER; note = 2'-deoxy-2'-fluorouridine-3'-phosphate
  modified_base 11: mod_base = OTHER; note = 2'-O-methylguanosine-3'-phosphate
  modified_base 12: mod_base = OTHER; note = 2'-O-methyluridine-3'-phosphate
  modified_base 13: mod_base = OTHER; note = 2'-O-methyluridine-3'-phosphate
  modified_base 14: mod_base = OTHER; note = 2'-deoxy-2'-fluorouridine-3'-phosphate
  modified_base 15: mod_base = OTHER; note = 2'-O-methylguanosine-3'-phosphate
  modified_base 16: mod_base = OTHER; note = 2'-deoxy-2'-fluorocytidine-3'-phosphate
  modified_base 17: mod_base = OTHER; note = 2'-O-methyluridine-3'-phosphate
  modified_base 18: mod_base = OTHER; note = 2'-deoxy-2'-fluorocytidine-3'-phosphate
  modified_base 19: mod_base = OTHER; note = 2'-O-methylcytidine-3'-phosphate
  modified_base 20: mod_base = OTHER; note = 2'-deoxy-2'-fluorouridine-3'-phosphate
  modified_base 21: mod_base = OTHER; note = 2'-O-methylguanosine-3'-phosphorothioate
  modified_base 22: mod_base = OTHER; note = 2'-deoxy-2'-fluorouridine-3'-phosphorothioate
  modified_base 23: mod_base = OTHER; note = 2'-O-methylcytidine
aatgacatatgtttgctcctgtc

SEQ ID NO: 195 - RNA, 23 nt, synthetic construct
  source 1..23: mol_type = other RNA
  modified_base 1: mod_base = OTHER; note = 2'-O-methyluridine-3'-phosphate
  modified_base 2: mod_base = OTHER; note = 2'-deoxy-2'-fluoroguanosine-3'-phosphate
  modified_base 3: mod_base = OTHER; note = 2'-O-methyladenosine-3'-phosphate
  modified_base 4: mod_base = OTHER; note = 2'-deoxy-2'-fluoroadenosine-3'-phosphate
  modified_base 5: mod_base = OTHER; note = 2'-O-methylcytidine-3'-phosphate
  modified_base 6: mod_base = OTHER; note = 2'-deoxy-2'-fluorouridine-3'-phosphate
  modified_base 7: mod_base = OTHER; note = 2'-O-methyladenosine-3'-phosphate
  modified_base 8: mod_base = OTHER; note = 2'-deoxy-2'-fluorocytidine-3'-phosphate
  modified_base 9: mod_base = OTHER; note = 2'-O-methyladenosine-3'-phosphate
  modified_base 10: mod_base = OTHER; note = 2'-deoxy-2'-fluoroguanosine-3'-phosphate
  modified_base 11: mod_base = OTHER; note = 2'-O-methyluridine-3'-phosphate
  modified_base 12: mod_base = OTHER; note = 2'-O-methyluridine-3'-phosphate
  modified_base 13: mod_base = OTHER; note = 2'-O-methylguanosine-3'-phosphate
  modified_base 14: mod_base = OTHER; note = 2'-deoxy-2'-fluorouridine-3'-phosphate
  modified_base 15: mod_base = OTHER; note = 2'-O-methyluridine-3'-phosphate
  modified_base 16: mod_base = OTHER; note = 2'-deoxy-2'-fluoroadenosine-3'-phosphate
  modified_base 17: mod_base = OTHER; note = 2'-O-methylcytidine-3'-phosphate
  modified_base 18: mod_base = OTHER; note = 2'-deoxy-2'-fluoroadenosine-3'-phosphate
  modified_base 19: mod_base = OTHER; note = 2'-O-methyluridine-3'-phosphate
  modified_base 20: mod_base = OTHER; note = 2'-deoxy-2'-fluoroguanosine-3'-phosphate
  modified_base 21: mod_base = OTHER; note = 2'-O-methyluridine-3'-phosphorothioate
  modified_base 22: mod_base = OTHER; note = 2'-deoxy-2'-fluoroadenosine-3'-phosphorothioate
  modified_base 23: mod_base = OTHER; note = 2'-O-methylcytidine
tgaactacagttgttacatgtac

SEQ ID NO: 196 - RNA, 23 nt, synthetic construct
  source 1..23: mol_type = other RNA
  modified_base 1: mod_base = OTHER; note = 2'-O-methyladenosine-3'-phosphate
  modified_base 2: mod_base = OTHER; note = 2'-deoxy-2'-fluoroadenosine-3'-phosphate
  modified_base 3: mod_base = OTHER; note = 2'-O-methyladenosine-3'-phosphate
  modified_base 4: mod_base = OTHER; note = 2'-deoxy-2'-fluorouridine-3'-phosphate
  modified_base 5: mod_base = OTHER; note = 2'-O-methylguanosine-3'-phosphate
  modified_base 6: mod_base = OTHER; note = 2'-deoxy-2'-fluorouridine-3'-phosphate
  modified_base 7: mod_base = OTHER; note = 2'-O-methyluridine-3'-phosphate
  modified_base 8: mod_base = OTHER; note = 2'-deoxy-2'-fluorocytidine-3'-phosphate
  modified_base 9: mod_base = OTHER; note = 2'-O-methylcytidine-3'-phosphate
  modified_base 10: mod_base = OTHER; note = 2'-deoxy-2'-fluoroadenosine-3'-phosphate
  modified_base 11: mod_base = OTHER; note = 2'-O-methyladenosine-3'-phosphate
  modified_base 12: mod_base = OTHER; note = 2'-O-methyluridine-3'-phosphate
  modified_base 13: mod_base = OTHER; note = 2'-O-methylguanosine-3'-phosphate
  modified_base 14: mod_base = OTHER; note = 2'-deoxy-2'-fluoroadenosine-3'-phosphate
  modified_base 15: mod_base = OTHER; note = 2'-O-methyluridine-3'-phosphate
  modified_base 16: mod_base = OTHER; note = 2'-deoxy-2'-fluorouridine-3'-phosphate
  modified_base 17: mod_base = OTHER; note = 2'-O-methyluridine-3'-phosphate
  modified_base 18: mod_base = OTHER; note = 2'-deoxy-2'-fluorocytidine-3'-phosphate
  modified_base 19: mod_base = OTHER; note = 2'-O-methylcytidine-3'-phosphate
  modified_base 20: mod_base = OTHER; note = 2'-deoxy-2'-fluorouridine-3'-phosphate
  modified_base 21: mod_base = OTHER; note = 2'-O-methylguanosine-3'-phosphorothioate
  modified_base 22: mod_base = OTHER; note = 2'-deoxy-2'-fluorouridine-3'-phosphorothioate
  modified_base 23: mod_base = OTHER; note = 2'-O-methyluridine
aaatgttccaatgatttcctgtt

SEQ ID NO: 197 - RNA, 23 nt, synthetic construct
  source 1..23: mol_type = other RNA
  modified_base 1: mod_base = OTHER; note = 2'-O-methyladenosine-3'-phosphate
  modified_base 2: mod_base = OTHER; note = 2'-deoxy-2'-fluoroguanosine-3'-phosphate
  modified_base 3: mod_base = OTHER; note = 2'-O-methyluridine-3'-phosphate
  modified_base 4: mod_base = OTHER; note = 2'-deoxy-2'-fluoroadenosine-3'-phosphate
  modified_base 5: mod_base = OTHER; note = 2'-O-methyladenosine-3'-phosphate
  modified_base 6: mod_base = OTHER; note = 2'-deoxy-2'-fluorouridine-3'-phosphate
  modified_base 7: mod_base = OTHER; note = 2'-O-methyluridine-3'-phosphate
  modified_base 8: mod_base = OTHER; note = 2'-deoxy-2'-fluorouridine-3'-phosphate
  modified_base 9: mod_base = OTHER; note = 2'-O-methylcytidine-3'-phosphate
  modified_base 10: mod_base = OTHER; note = 2'-deoxy-2'-fluoroadenosine-3'-phosphate
  modified_base 11: mod_base = OTHER; note = 2'-O-methyladenosine-3'-phosphate
  modified_base 12: mod_base = OTHER; note = 2'-O-methyladenosine-3'-phosphate
  modified_base 13: mod_base = OTHER; note = 2'-O-methyladenosine-3'-phosphate
  modified_base 14: mod_base = OTHER; note = 2'-deoxy-2'-fluorouridine-3'-phosphate
  modified_base 15: mod_base = OTHER; note = 2'-O-methyluridine-3'-phosphate
  modified_base 16: mod_base = OTHER; note = 2'-deoxy-2'-fluorocytidine-3'-phosphate
  modified_base 17: mod_base = OTHER; note = 2'-O-methyluridine-3'-phosphate
  modified_base 18: mod_base = OTHER; note = 2'-deoxy-2'-fluorouridine-3'-phosphate
  modified_base 19: mod_base = OTHER; note = 2'-O-methyladenosine-3'-phosphate
  modified_base 20: mod_base = OTHER; note = 2'-deoxy-2'-fluoroadenosine-3'-phosphate
  modified_base 21: mod_base = OTHER; note = 2'-O-methyladenosine-3'-phosphorothioate
  modified_base 22: mod_base = OTHER; note = 2'-deoxy-2'-fluoroguanosine-3'-phosphorothioate
  modified_base 23: mod_base = OTHER; note = 2'-O-methyluridine
agtaatttcaaaattcttaaagt

SEQ ID NO: 198 - RNA, 23 nt, synthetic construct
  source 1..23: mol_type = other RNA
  modified_base 1: mod_base = OTHER; note = 2'-O-methyladenosine-3'-phosphate
  modified_base 2: mod_base = OTHER; note = 2'-deoxy-2'-fluorouridine-3'-phosphate
  modified_base 3: mod_base = OTHER; note = 2'-O-methylcytidine-3'-phosphate
  modified_base 4: mod_base = OTHER; note = 2'-deoxy-2'-fluoroguanosine-3'-phosphate
  modified_base 5: mod_base = OTHER; note = 2'-O-methyladenosine-3'-phosphate
  modified_base 6: mod_base = OTHER; note = 2'-deoxy-2'-fluoroadenosine-3'-phosphate
  modified_base 7: mod_base = OTHER; note = 2'-O-methyluridine-3'-phosphate
  modified_base 8: mod_base = OTHER; note = 2'-deoxy-2'-fluorouridine-3'-phosphate
  modified_base 9: mod_base = OTHER; note = 2'-O-methylcytidine-3'-phosphate
  modified_base 10: mod_base = OTHER; note = 2'-deoxy-2'-fluoroadenosine-3'-phosphate
  modified_base 11: mod_base = OTHER; note = 2'-O-methylguanosine-3'-phosphate
  modified_base 12: mod_base = OTHER; note = 2'-O-methyluridine-3'-phosphate
  modified_base 13: mod_base = OTHER; note = 2'-O-methyluridine-3'-phosphate
  modified_base 14: mod_base = OTHER; note = 2'-deoxy-2'-fluoroguanosine-3'-phosphate
  modified_base 15: mod_base = OTHER; note = 2'-O-methylcytidine-3'-phosphate
  modified_base 16: mod_base = OTHER; note = 2'-deoxy-2'-fluoroadenosine-3'-phosphate
  modified_base 17: mod_base = OTHER; note = 2'-O-methylguanosine-3'-phosphate
  modified_base 18: mod_base = OTHER; note = 2'-deoxy-2'-fluoroadenosine-3'-phosphate
  modified_base 19: mod_base = OTHER; note = 2'-O-methyladenosine-3'-phosphate
  modified_base 20: mod_base = OTHER; note = 2'-deoxy-2'-fluorouridine-3'-phosphate
  modified_base 21: mod_base = OTHER; note = 2'-O-methyladenosine-3'-phosphorothioate
  modified_base 22: mod_base = OTHER; note = 2'-deoxy-2'-fluoroadenosine-3'-phosphorothioate
  modified_base 23: mod_base = OTHER; note = 2'-O-methylcytidine
atcgaattcagttgcagaataac

SEQ ID NO: 199 - RNA, 23 nt, synthetic construct
  source 1..23: mol_type = other RNA
  modified_base 1: mod_base = OTHER; note = 2'-O-methyluridine-3'-phosphate
  modified_base 2: mod_base = OTHER; note = 2'-deoxy-2'-fluoroguanosine-3'-phosphate
  modified_base 3: mod_base = OTHER; note = 2'-O-methyladenosine-3'-phosphate
  modified_base 4: mod_base = OTHER; note = 2'-deoxy-2'-fluoroadenosine-3'-phosphate
  modified_base 5: mod_base = OTHER; note = 2'-O-methyladenosine-3'-phosphate
  modified_base 6: mod_base = OTHER; note = 2'-deoxy-2'-fluorouridine-3'-phosphate
  modified_base 7: mod_base = OTHER; note = 2'-O-methyladenosine-3'-phosphate
  modified_base 8: mod_base = OTHER; note = 2'-deoxy-2'-fluorocytidine-3'-phosphate
  modified_base 9: mod_base = OTHER; note = 2'-O-methyluridine-3'-phosphate
  modified_base 10: mod_base = OTHER; note = 2'-deoxy-2'-fluorocytidine-3'-phosphate
  modified_base 11: mod_base = OTHER; note = 2'-O-methyluridine-3'-phosphate
  modified_base 12: mod_base = OTHER; note = 2'-O-methyluridine-3'-phosphate
  modified_base 13: mod_base = OTHER; note = 2'-O-methyluridine-3'-phosphate
  modified_base 14: mod_base = OTHER; note = 2'-deoxy-2'-fluorocytidine-3'-phosphate
  modified_base 15: mod_base = OTHER; note = 2'-O-methylcytidine-3'-phosphate
  modified_base 16: mod_base = OTHER; note = 2'-deoxy-2'-fluoroadenosine-3'-phosphate
  modified_base 17: mod_base = OTHER; note = 2'-O-methyladenosine-3'-phosphate
  modified_base 18: mod_base = OTHER; note = 2'-deoxy-2'-fluoroguanosine-3'-phosphate
  modified_base 19: mod_base = OTHER; note = 2'-O-methylguanosine-3'-phosphate
  modified_base 20: mod_base = OTHER; note = 2'-deoxy-2'-fluoroguanosine-3'-phosphate
  modified_base 21: mod_base = OTHER; note = 2'-O-methylcytidine-3'-phosphorothioate
  modified_base 22: mod_base = OTHER; note = 2'-deoxy-2'-fluorouridine-3'-phosphorothioate
  modified_base 23: mod_base = OTHER; note = 2'-O-methyluridine
tgaaatactctttccaagggctt

SEQ ID NO: 200 - RNA, 23 nt, synthetic construct
  source 1..23: mol_type = other RNA
  modified_base 1: mod_base = OTHER; note = 2'-O-methylguanosine-3'-phosphate
  modified_base 2: mod_base = OTHER; note = 2'-deoxy-2'-fluorouridine-3'-phosphate
  modified_base 3: mod_base = OTHER; note = 2'-O-methyladenosine-3'-phosphate
  modified_base 4: mod_base = OTHER; note = 2'-deoxy-2'-fluoroadenosine-3'-phosphate
  modified_base 5: mod_base = OTHER; note = 2'-O-methylcytidine-3'-phosphate
  modified_base 6: mod_base = OTHER; note = 2'-deoxy-2'-fluorouridine-3'-phosphate
  modified_base 7: mod_base = OTHER; note = 2'-O-methyladenosine-3'-phosphate
  modified_base 8: mod_base = OTHER; note = 2'-deoxy-2'-fluoroadenosine-3'-phosphate
  modified_base 9: mod_base = OTHER; note = 2'-O-methyladenosine-3'-phosphate
  modified_base 10: mod_base = OTHER; note = 2'-deoxy-2'-fluorouridine-3'-phosphate
  modified_base 11: mod_base = OTHER; note = 2'-O-methyluridine-3'-phosphate
  modified_base 12: mod_base = OTHER; note = 2'-O-methyluridine-3'-phosphate
  modified_base 13: mod_base = OTHER; note = 2'-O-methyluridine-3'-phosphate
  modified_base 14: mod_base = OTHER; note = 2'-deoxy-2'-fluorouridine-3'-phosphate
  modified_base 15: mod_base = OTHER; note = 2'-O-methyluridine-3'-phosphate
  modified_base 16: mod_base = OTHER; note = 2'-deoxy-2'-fluoroadenosine-3'-phosphate
  modified_base 17: mod_base = OTHER; note = 2'-O-methyluridine-3'-phosphate
  modified_base 18: mod_base = OTHER; note = 2'-deoxy-2'-fluorocytidine-3'-phosphate
  modified_base 19: mod_base = OTHER; note = 2'-O-methyladenosine-3'-phosphate
  modified_base 20: mod_base = OTHER; note = 2'-deoxy-2'-fluoroguanosine-3'-phosphate
  modified_base 21: mod_base = OTHER; note = 2'-O-methylguanosine-3'-phosphorothioate
  modified_base 22: mod_base = OTHER; note = 2'-deoxy-2'-fluoroadenosine-3'-phosphorothioate
  modified_base 23: mod_base = OTHER; note = 2'-O-methyluridine
gtaactaaattttttatcaggat

SEQ ID NO: 201 - RNA, 23 nt, synthetic construct
  source 1..23: mol_type = other RNA
  modified_base 1: mod_base = OTHER; note = 2'-O-methyluridine-3'-phosphate
  modified_base 2: mod_base = OTHER; note = 2'-deoxy-2'-fluorouridine-3'-phosphate
  modified_base 3: mod_base = OTHER; note = 2'-O-methylguanosine-3'-phosphate
  modified_base 4: mod_base = OTHER; note = 2'-deoxy-2'-fluoroadenosine-3'-phosphate
  modified_base 5: mod_base = OTHER; note = 2'-O-methyladenosine-3'-phosphate
  modified_base 6: mod_base = OTHER; note = 2'-deoxy-2'-fluoroadenosine-3'-phosphate
  modified_base 7: mod_base = OTHER; note = 2'-O-methyluridine-3'-phosphate
  modified_base 8: mod_base = OTHER; note = 2'-deoxy-2'-fluoroadenosine-3'-phosphate
  modified_base 9: mod_base = OTHER; note = 2'-O-methylcytidine-3'-phosphate
  modified_base 10: mod_base = OTHER; note = 2'-deoxy-2'-fluorouridine-3'-phosphate
  modified_base 11: mod_base = OTHER; note = 2'-O-methylcytidine-3'-phosphate
  modified_base 12: mod_base = OTHER; note = 2'-O-methyluridine-3'-phosphate
  modified_base 13: mod_base = OTHER; note = 2'-O-methyluridine-3'-phosphate
  modified_base 14: mod_base = OTHER; note = 2'-deoxy-2'-fluorouridine-3'-phosphate
  modified_base 15: mod_base = OTHER; note = 2'-O-methylcytidine-3'-phosphate
  modified_base 16: mod_base = OTHER; note = 2'-deoxy-2'-fluorocytidine-3'-phosphate
  modified_base 17: mod_base = OTHER; note = 2'-O-methyladenosine-3'-phosphate
  modified_base 18: mod_base = OTHER; note = 2'-deoxy-2'-fluoroadenosine-3'-phosphate
  modified_base 19: mod_base = OTHER; note = 2'-O-methylguanosine-3'-phosphate
  modified_base 20: mod_base = OTHER; note = 2'-deoxy-2'-fluoroguanosine-3'-phosphate
  modified_base 21: mod_base = OTHER; note = 2'-O-methylguanosine-3'-phosphorothioate
  modified_base 22: mod_base = OTHER; note = 2'-deoxy-2'-fluorocytidine-3'-phosphorothioate
  modified_base 23: mod_base = OTHER; note = 2'-O-methyluridine
ttgaaatactctttccaagggct

SEQ ID NO: 202 - RNA, 23 nt, synthetic construct
  source 1..23: mol_type = other RNA
  modified_base 1: mod_base = OTHER; note = 2'-O-methyluridine-3'-phosphate
  modified_base 2: mod_base = OTHER; note = 2'-deoxy-2'-fluoroguanosine-3'-phosphate
  modified_base 3: mod_base = OTHER; note = 2'-O-methyladenosine-3'-phosphate
  modified_base 4: mod_base = OTHER; note = 2'-deoxy-2'-fluoroadenosine-3'-phosphate
  modified_base 5: mod_base = OTHER; note = 2'-O-methyladenosine-3'-phosphate
  modified_base 6: mod_base = OTHER; note = 2'-deoxy-2'-fluorouridine-3'-phosphate
  modified_base 7: mod_base = OTHER; note = 2'-O-methyluridine-3'-phosphate
  modified_base 8: mod_base = OTHER; note = 2'-deoxy-2'-fluoroguanosine-3'-phosphate
  modified_base 9: mod_base = OTHER; note = 2'-O-methyluridine-3'-phosphate
  modified_base 10: mod_base = OTHER; note = 2'-deoxy-2'-fluoroguanosine-3'-phosphate
  modified_base 11: mod_base = OTHER; note = 2'-O-methyluridine-3'-phosphate
  modified_base 12: mod_base = OTHER; note = 2'-O-methyluridine-3'-phosphate
  modified_base 13: mod_base = OTHER; note = 2'-O-methyluridine-3'-phosphate
  modified_base 14: mod_base = OTHER; note = 2'-deoxy-2'-fluoroguanosine-3'-phosphate
  modified_base 15: mod_base = OTHER; note = 2'-O-methyladenosine-3'-phosphate
  modified_base 16: mod_base = OTHER; note = 2'-deoxy-2'-fluorouridine-3'-phosphate
  modified_base 17: mod_base = OTHER; note = 2'-O-methylcytidine-3'-phosphate
  modified_base 18: mod_base = OTHER; note = 2'-deoxy-2'-fluorouridine-3'-phosphate
  modified_base 19: mod_base = OTHER; note = 2'-O-methylguanosine-3'-phosphate
  modified_base 20: mod_base = OTHER; note = 2'-deoxy-2'-fluorocytidine-3'-phosphate
  modified_base 21: mod_base = OTHER; note = 2'-O-methyladenosine-3'-phosphorothioate
  modified_base 22: mod_base = OTHER; note = 2'-deoxy-2'-fluoroguanosine-3'-phosphorothioate
  modified_base 23: mod_base = OTHER; note = 2'-O-methyladenosine
tgaaattgtgtttgatctgcaga

SEQ ID NO: 203 - RNA, 23 nt, synthetic construct
  source 1..23: mol_type = other RNA
  modified_base 1: mod_base = OTHER; note = 2'-O-methyladenosine-3'-phosphate
  modified_base 2: mod_base = OTHER; note = 2'-deoxy-2'-fluorocytidine-3'-phosphate
  modified_base 3: mod_base = OTHER; note = 2'-O-methyluridine-3'-phosphate
  modified_base 4: mod_base = OTHER; note = 2'-deoxy-2'-fluoroguanosine-3'-phosphate
  modified_base 5: mod_base = OTHER; note = 2'-O-methyladenosine-3'-phosphate
  modified_base 6: mod_base = OTHER; note = 2'-deoxy-2'-fluoroadenosine-3'-phosphate
  modified_base 7: mod_base = OTHER; note = 2'-O-methyladenosine-3'-phosphate
  modified_base 8: mod_base = OTHER; note = 2'-deoxy-2'-fluorouridine-3'-phosphate
  modified_base 9: mod_base = OTHER; note = 2'-O-methyluridine-3'-phosphate
  modified_base 10: mod_base = OTHER; note = 2'-deoxy-2'-fluoroguanosine-3'-phosphate
  modified_base 11: mod_base = OTHER; note = 2'-O-methyluridine-3'-phosphate
  modified_base 12: mod_base = OTHER; note = 2'-O-methylguanosine-3'-phosphate
  modified_base 13: mod_base = OTHER; note = 2'-O-methyluridine-3'-phosphate
  modified_base 14: mod_base = OTHER; note = 2'-deoxy-2'-fluorouridine-3'-phosphate
  modified_base 15: mod_base = OTHER; note = 2'-O-methyluridine-3'-phosphate
  modified_base 16: mod_base = OTHER; note = 2'-deoxy-2'-fluoroguanosine-3'-phosphate
  modified_base 17: mod_base = OTHER; note = 2'-O-methyladenosine-3'-phosphate
  modified_base 18: mod_base = OTHER; note = 2'-deoxy-2'-fluorouridine-3'-phosphate
  modified_base 19: mod_base = OTHER; note = 2'-O-methylcytidine-3'-phosphate
  modified_base 20: mod_base = OTHER; note = 2'-deoxy-2'-fluorouridine-3'-phosphate
  modified_base 21: mod_base = OTHER; note = 2'-O-methylguanosine-3'-phosphorothioate
  modified_base 22: mod_base = OTHER; note = 2'-deoxy-2'-fluorocytidine-3'-phosphorothioate
  modified_base 23: mod_base = OTHER; note = 2'-O-methyladenosine
actgaaattgtgtttgatctgca

SEQ ID NO: 204 - RNA, 23 nt, synthetic construct
  source 1..23: mol_type = other RNA
  modified_base 1: mod_base = OTHER; note = 2'-O-methyladenosine-3'-phosphate
  modified_base 2: mod_base = OTHER; note = 2'-deoxy-2'-fluoroadenosine-3'-phosphate
  modified_base 3: mod_base = OTHER; note = 2'-O-methyladenosine-3'-phosphate
  modified_base 4: mod_base = OTHER; note = 2'-deoxy-2'-fluoroadenosine-3'-phosphate
  modified_base 5: mod_base = OTHER; note = 2'-O-methylguanosine-3'-phosphate
  modified_base 6: mod_base = OTHER; note = 2'-deoxy-2'-fluorouridine-3'-phosphate
  modified_base 7: mod_base = OTHER; note = 2'-O-methyluridine-3'-phosphate
  modified_base 8: mod_base = OTHER; note = 2'-deoxy-2'-fluorocytidine-3'-phosphate
  modified_base 9: mod_base = OTHER; note = 2'-O-methyladenosine-3'-phosphate
  modified_base 10: mod_base = OTHER; note = 2'-deoxy-2'-fluoroadenosine-3'-phosphate
  modified_base 11: mod_base = OTHER; note = 2'-O-methyladenosine-3'-phosphate
  modified_base 12: mod_base = OTHER; note = 2'-O-methyluridine-3'-phosphate
  modified_base 13: mod_base = OTHER; note = 2'-O-methyladenosine-3'-phosphate
  modified_base 14: mod_base = OTHER; note = 2'-deoxy-2'-fluorouridine-3'-phosphate
  modified_base 15: mod_base = OTHER; note = 2'-O-methylcytidine-3'-phosphate
  modified_base 16: mod_base = OTHER; note = 2'-deoxy-2'-fluorocytidine-3'-phosphate
  modified_base 17: mod_base = OTHER; note = 2'-O-methylguanosine-3'-phosphate
  modified_base 18: mod_base = OTHER; note = 2'-deoxy-2'-fluoroguanosine-3'-phosphate
  modified_base 19: mod_base = OTHER; note = 2'-O-methyladenosine-3'-phosphate
  modified_base 20: mod_base = OTHER; note = 2'-deoxy-2'-fluoroadenosine-3'-phosphate
  modified_base 21: mod_base = OTHER; note = 2'-O-methylcytidine-3'-phosphorothioate
  modified_base 22: mod_base = OTHER; note = 2'-deoxy-2'-fluorocytidine-3'-phosphorothioate
  modified_base 23: mod_base = OTHER; note = 2'-O-methylguanosine
aaaagttcaaatatccggaaccg

SEQ ID NO: 205 - RNA, 23 nt, synthetic construct
  source 1..23: mol_type = other RNA
  modified_base 1: mod_base = OTHER; note = 2'-O-methyladenosine-3'-phosphorothioate
  modified_base 2: mod_base = OTHER; note = 2'-deoxy-2'-fluoroadenosine-3'-phosphorothioate
  modified_base 3: mod_base = OTHER; note = 2'-O-methyladenosine-3'-phosphate
  modified_base 4: mod_base = OTHER; note = 2'-deoxy-2'-fluoroguanosine-3'-phosphate
  modified_base 5: mod_base = OTHER; note = 2'-O-methylguanosine-3'-phosphate
  modified_base 6: mod_base = OTHER; note = 2'-deoxy-2'-fluorouridine-3'-phosphate
  modified_base 7: mod_base = OTHER; note = 2'-O-methyladenosine-3'-phosphate
  modified_base 8: mod_base = OTHER; note = 2'-deoxy-2'-fluorocytidine-3'-phosphate
  modified_base 9: mod_base = OTHER; note = 2'-O-methyluridine-3'-phosphate
  modified_base 10: mod_base = OTHER; note = 2'-deoxy-2'-fluorouridine-3'-phosphate
  modified_base 11: mod_base = OTHER; note = 2'-O-methylguanosine-3'-phosphate
  modified_base 12: mod_base = OTHER; note = 2'-O-methyluridine-3'-phosphate
  modified_base 13: mod_base = OTHER; note = 2'-O-methyluridine-3'-phosphate
  modified_base 14: mod_base = OTHER; note = 2'-deoxy-2'-fluoroguanosine-3'-phosphate
  modified_base 15: mod_base = OTHER; note = 2'-O-methyluridine-3'-phosphate
  modified_base 16: mod_base = OTHER; note = 2'-deoxy-2'-fluorouridine-3'-phosphate
  modified_base 17: mod_base = OTHER; note = 2'-O-methyluridine-3'-phosphate
  modified_base 18: mod_base = OTHER; note = 2'-deoxy-2'-fluoroadenosine-3'-phosphate
  modified_base 19: mod_base = OTHER; note = 2'-O-methyladenosine-3'-phosphate
  modified_base 20: mod_base = OTHER; note = 2'-deoxy-2'-fluoroadenosine-3'-phosphate
  modified_base 21: mod_base = OTHER; note = 2'-O-methyluridine-3'-phosphorothioate
  modified_base 22: mod_base = OTHER; note = 2'-O-methylcytidine-3'-phosphorothioate
  modified_base 23: mod_base = OTHER; note = 2'-O-methyluridine
aaaggtacttgttgtttaaatct

SEQ ID NO: 206 - RNA, 23 nt, synthetic construct
  source 1..23: mol_type = other RNA
  modified_base 1: mod_base = OTHER; note = 2'-O-methyladenosine-3'-phosphorothioate
  modified_base 2: mod_base = OTHER; note = 2'-deoxy-2'-fluoroadenosine-3'-phosphorothioate
  modified_base 3: mod_base = OTHER; note = 2'-O-methyladenosine-3'-phosphate
  modified_base 4: mod_base = OTHER; note = 2'-deoxy-2'-fluoroguanosine-3'-phosphorothioate
  modified_base 5: mod_base = OTHER; note = 2'-O-methylguanosine-3'-phosphate
  modified_base 6: mod_base = OTHER; note = 2'-deoxy-2'-fluorouridine-3'-phosphorothioate
  modified_base 7: mod_base = OTHER; note = 2'-O-methyladenosine-3'-phosphate
  modified_base 8: mod_base = OTHER; note = 2'-deoxy-2'-fluorocytidine-3'-phosphorothioate
  modified_base 9: mod_base = OTHER; note = 2'-O-methyluridine-3'-phosphate
  modified_base 10: mod_base = OTHER; note = 2'-deoxy-2'-fluorouridine-3'-phosphorothioate
  modified_base 11: mod_base = OTHER; note = 2'-O-methylguanosine-3'-phosphate
  modified_base 12: mod_base = OTHER; note = 2'-O-methyluridine-3'-phosphate
  modified_base 13: mod_base = OTHER; note = 2'-O-methyluridine-3'-phosphate
  modified_base 14: mod_base = OTHER; note = 2'-deoxy-2'-fluoroguanosine-3'-phosphorothioate
  modified_base 15: mod_base = OTHER; note = 2'-O-methyluridine-3'-phosphate
  modified_base 16: mod_base = OTHER; note = 2'-deoxy-2'-fluorouridine-3'-phosphorothioate
  modified_base 17: mod_base = OTHER; note = 2'-O-methyluridine-3'-phosphate
  modified_base 18: mod_base = OTHER; note = 2'-deoxy-2'-fluoroadenosine-3'-phosphorothioate
  modified_base 19: mod_base = OTHER; note = 2'-O-methyladenosine-3'-phosphate
  modified_base 20: mod_base = OTHER; note = 2'-deoxy-2'-fluoroadenosine-3'-phosphorothioate
  modified_base 21: mod_base = OTHER; note = 2'-O-methyluridine-3'-phosphorothioate
  modified_base 22: mod_base = OTHER; note = 2'-O-methylcytidine-3'-phosphorothioate
  modified_base 23: mod_base = OTHER; note = 2'-O-methyluridine
aaaggtacttgttgtttaaatct

SEQ ID NO: 207 - RNA, 23 nt, synthetic construct
  source 1..23: mol_type = other RNA
  modified_base 1: mod_base = OTHER; note = 2'-O-methyluridine-3'-phosphorothioate
  modified_base 2: mod_base = OTHER; note = 2'-deoxy-2'-fluorouridine-3'-phosphorothioate
  modified_base 3: mod_base = OTHER; note = 2'-O-methyladenosine-3'-phosphate
  modified_base 4: mod_base = OTHER; note = 2'-deoxy-2'-fluorouridine-3'-phosphate
  modified_base 5: mod_base = OTHER; note = 2'-O-methyladenosine-3'-phosphate
  modified_base 6: mod_base = OTHER; note = 2'-deoxy-2'-fluoroguanosine-3'-phosphate
  modified_base 7: mod_base = OTHER; note = 2'-O-methyluridine-3'-phosphate
  modified_base 8: mod_base = OTHER; note = 2'-deoxy-2'-fluoroguanosine-3'-phosphate
  modified_base 9: mod_base = OTHER; note = 2'-O-methyladenosine-3'-phosphate
  modified_base 10: mod_base = OTHER; note = 2'-deoxy-2'-fluoroguanosine-3'-phosphate
  modified_base 11: mod_base = OTHER; note = 2'-O-methyluridine-3'-phosphate
  modified_base 12: mod_base = OTHER; note = 2'-O-methyluridine-3'-phosphate
  modified_base 13: mod_base = OTHER; note = 2'-O-methyladenosine-3'-phosphate
  modified_base 14: mod_base = OTHER; note = 2'-deoxy-2'-fluorouridine-3'-phosphate
  modified_base 15: mod_base = OTHER; note = 2'-O-methyluridine-3'-phosphate
  modified_base 16: mod_base = OTHER; note = 2'-deoxy-2'-fluorouridine-3'-phosphate
  modified_base 17: mod_base = OTHER; note = 2'-O-methyluridine-3'-phosphate
  modified_base 18: mod_base = OTHER; note = 2'-deoxy-2'-fluoroguanosine-3'-phosphate
  modified_base 19: mod_base = OTHER; note = 2'-O-methyluridine-3'-phosphate
  modified_base 20: mod_base = OTHER; note = 2'-deoxy-2'-fluorocytidine-3'-phosphate
  modified_base 21: mod_base = OTHER; note = 2'-O-methyladenosine-3'-phosphorothioate
  modified_base 22: mod_base = OTHER; note = 2'-O-methyladenosine-3'-phosphorothioate
  modified_base 23: mod_base = OTHER; note = 2'-O-methyluridine
ttatagtgagttattttgtcaat

SEQ ID NO: 208 - RNA, 23 nt, synthetic construct
  source 1..23: mol_type = other RNA
  modified_base 1: mod_base = OTHER; note = 2'-O-methyluridine-3'-phosphorothioate
  modified_base 2: mod_base = OTHER; note = 2'-deoxy-2'-fluorouridine-3'-phosphorothioate
  modified_base 3: mod_base = OTHER; note = 2'-O-methyladenosine-3'-phosphate
  modified_base 4: mod_base = OTHER; note = 2'-deoxy-2'-fluorouridine-3'-phosphorothioate
  modified_base 5: mod_base = OTHER; note = 2'-O-methyladenosine-3'-phosphate
  modified_base 6: mod_base = OTHER; note = 2'-deoxy-2'-fluoroguanosine-3'-phosphorothioate
  modified_base 7: mod_base = OTHER; note = 2'-O-methyluridine-3'-phosphate
  modified_base 8: mod_base = OTHER; note = 2'-deoxy-2'-fluoroguanosine-3'-phosphorothioate
  modified_base 9: mod_base = OTHER; note = 2'-O-methyladenosine-3'-phosphate
  modified_base 10: mod_base = OTHER; note = 2'-deoxy-2'-fluoroguanosine-3'-phosphorothioate
  modified_base 11: mod_base = OTHER; note = 2'-O-methyluridine-3'-phosphate
  modified_base 12: mod_base = OTHER; note = 2'-O-methyluridine-3'-phosphate
  modified_base 13: mod_base = OTHER; note = 2'-O-methyladenosine-3'-phosphate
  modified_base 14: mod_base = OTHER; note = 2'-deoxy-2'-fluorouridine-3'-phosphorothioate
  modified_base 15: mod_base = OTHER; note = 2'-O-methyluridine-3'-phosphate
  modified_base 16: mod_base = OTHER; note = 2'-deoxy-2'-fluorouridine-3'-phosphorothioate
  modified_base 17: mod_base = OTHER; note = 2'-O-methyluridine-3'-phosphate
  modified_base 18: mod_base = OTHER; note = 2'-deoxy-2'-fluoroguanosine-3'-phosphorothioate
  modified_base 19: mod_base = OTHER; note = 2'-O-methyluridine-3'-phosphate
  modified_base 20: mod_base = OTHER; note = 2'-deoxy-2'-fluorocytidine-3'-phosphorothioate
  modified_base 21: mod_base = OTHER; note = 2'-O-methyladenosine-3'-phosphorothioate
  modified_base 22: mod_base = OTHER; note = 2'-O-methyladenosine-3'-phosphorothioate
  modified_base 23: mod_base = OTHER; note = 2'-O-methyluridine
ttatagtgagttattttgtcaat

SEQ ID NO: 209 - RNA, 23 nt, synthetic construct
  source 1..23: mol_type = other RNA
  modified_base 1: mod_base = OTHER; note = 2'-O-methyladenosine-3'-phosphorothioate
  modified_base 2: mod_base = OTHER; note = 2'-deoxy-2'-fluorouridine-3'-phosphorothioate
  modified_base 3: mod_base = OTHER; note = 2'-O-methyluridine-3'-phosphate
  modified_base 4: mod_base = OTHER; note = 2'-deoxy-2'-fluoroadenosine-3'-phosphate
  modified_base 5: mod_base = OTHER; note = 2'-O-methyluridine-3'-phosphate
  modified_base 6: mod_base = OTHER; note = 2'-deoxy-2'-fluoroadenosine-3'-phosphate
  modified_base 7: mod_base = OTHER; note = 2'-O-methylguanosine-3'-phosphate
  modified_base 8: mod_base = OTHER; note = 2'-deoxy-2'-fluorouridine-3'-phosphate
  modified_base 9: mod_base = OTHER; note = 2'-O-methylguanosine-3'-phosphate
  modified_base 10: mod_base = OTHER; note = 2'-deoxy-2'-fluoroadenosine-3'-phosphate
  modified_base 11: mod_base = OTHER; note = 2'-O-methylguanosine-3'-phosphate
  modified_base 12: mod_base = OTHER; note = 2'-O-methyluridine-3'-phosphate
  modified_base 13: mod_base = OTHER; note = 2'-O-methyluridine-3'-phosphate
  modified_base 14: mod_base = OTHER; note = 2'-deoxy-2'-fluoroadenosine-3'-phosphate
  modified_base 15: mod_base = OTHER; note = 2'-O-methyluridine-3'-phosphate
  modified_base 16: mod_base = OTHER; note = 2'-deoxy-2'-fluorouridine-3'-phosphate
  modified_base 17: mod_base = OTHER; note = 2'-O-methyluridine-3'-phosphate
  modified_base 18: mod_base = OTHER; note = 2'-deoxy-2'-fluorouridine-3'-phosphate
  modified_base 19: mod_base = OTHER; note = 2'-O-methylguanosine-3'-phosphate
  modified_base 20: mod_base = OTHER; note = 2'-deoxy-2'-fluorouridine-3'-phosphate
  modified_base 21: mod_base = OTHER; note = 2'-O-methylcytidine-3'-phosphorothioate
  modified_base 22: mod_base = OTHER; note = 2'-O-methyladenosine-3'-phosphorothioate
  modified_base 23: mod_base = OTHER; note = 2'-O-methyladenosine
attatagtgagttattttgtcaa

SEQ ID NO: 210 - RNA, 23 nt, synthetic construct
  source 1..23: mol_type = other RNA
  modified_base 1: mod_base = OTHER; note = 2'-O-methyladenosine-3'-phosphorothioate
  modified_base 2: mod_base = OTHER; note = 2'-deoxy-2'-fluorouridine-3'-phosphorothioate
  modified_base 3: mod_base = OTHER; note = 2'-O-methyluridine-3'-phosphate
  modified_base 4: mod_base = OTHER; note = 2'-deoxy-2'-fluoroadenosine-3'-phosphorothioate
  modified_base 5: mod_base = OTHER; note = 2'-O-methyluridine-3'-phosphate
  modified_base 6: mod_base = OTHER; note = 2'-deoxy-2'-fluoroadenosine-3'-phosphorothioate
  modified_base 7: mod_base = OTHER; note = 2'-O-methylguanosine-3'-phosphate
  modified_base 8: mod_base = OTHER; note = 2'-deoxy-2'-fluorouridine-3'-phosphorothioate
  modified_base 9: mod_base = OTHER; note = 2'-O-methylguanosine-3'-phosphate
  modified_base 10: mod_base = OTHER; note = 2'-deoxy-2'-fluoroadenosine-3'-phosphorothioate
  modified_base 11: mod_base = OTHER; note = 2'-O-methylguanosine-3'-phosphate
  modified_base 12: mod_base = OTHER; note = 2'-O-methyluridine-3'-phosphate
  modified_base 13: mod_base = OTHER; note = 2'-O-methyluridine-3'-phosphate
  modified_base 14: mod_base = OTHER; note = 2'-deoxy-2'-fluoroadenosine-3'-phosphorothioate
  modified_base 15: mod_base = OTHER; note = 2'-O-methyluridine-3'-phosphate
  modified_base 16: mod_base = OTHER; note = 2'-deoxy-2'-fluorouridine-3'-phosphorothioate
  modified_base 17: mod_base = OTHER; note = 2'-O-methyluridine-3'-phosphate
  modified_base 18: mod_base = OTHER; note = 2'-deoxy-2'-fluorouridine-3'-phosphorothioate
  modified_base 19: mod_base = OTHER; note = 2'-O-methylguanosine-3'-phosphate
  modified_base 20: mod_base = OTHER; note = 2'-deoxy-2'-fluorouridine-3'-phosphorothioate
  modified_base 21: mod_base = OTHER; note = 2'-O-methylcytidine-3'-phosphorothioate
  modified_base 22: mod_base = OTHER; note = 2'-O-methyladenosine-3'-phosphorothioate
  modified_base 23: mod_base = OTHER; note = 2'-O-methyladenosine
attatagtgagttattttgtcaa

SEQ ID NO: 211 - RNA, 23 nt, synthetic construct
  source 1..23: mol_type = other RNA
  modified_base 1: mod_base = OTHER; note = 2'-O-methyladenosine-3'-phosphorothioate
  modified_base 2: mod_base = OTHER; note = 2'-deoxy-2'-fluoroadenosine-3'-phosphorothioate
  modified_base 3: mod_base = OTHER; note = 2'-O-methyladenosine-3'-phosphate
  modified_base 4: mod_base = OTHER; note = 2'-deoxy-2'-fluoroadenosine-3'-phosphate
  modified_base 5: mod_base = OTHER; note = 2'-O-methylguanosine-3'-phosphate
  modified_base 6: mod_base = OTHER; note = 2'-deoxy-2'-fluorouridine-3'-phosphate
  modified_base 7: mod_base = OTHER; note = 2'-O-methyluridine-3'-phosphate
  modified_base 8: mod_base = OTHER; note = 2'-deoxy-2'-fluorocytidine-3'-phosphate
  modified_base 9: mod_base = OTHER; note = 2'-O-methyladenosine-3'-phosphate
  modified_base 10: mod_base = OTHER; note = 2'-deoxy-2'-fluoroadenosine-3'-phosphate
  modified_base 11: mod_base = OTHER; note = 2'-O-methyladenosine-3'-phosphate
  modified_base 12: mod_base = OTHER; note = 2'-O-methyluridine-3'-phosphate
  modified_base 13: mod_base = OTHER; note = 2'-O-methyladenosine-3'-phosphate
  modified_base 14: mod_base = OTHER; note = 2'-deoxy-2'-fluorouridine-3'-phosphate
  modified_base 15: mod_base = OTHER; note = 2'-O-methylcytidine-3'-phosphate
  modified_base 16: mod_base = OTHER; note = 2'-deoxy-2'-fluorocytidine-3'-phosphate
  modified_base 17: mod_base = OTHER; note = 2'-O-methylguanosine-3'-phosphate
  modified_base 18: mod_base = OTHER; note = 2'-deoxy-2'-fluoroguanosine-3'-phosphate
  modified_base 19: mod_base = OTHER; note = 2'-O-methyladenosine-3'-phosphate
  modified_base 20: mod_base = OTHER; note = 2'-deoxy-2'-fluoroadenosine-3'-phosphate
  modified_base 21: mod_base = OTHER; note = 2'-O-methylcytidine-3'-phosphorothioate
  modified_base 22: mod_base = OTHER; note = 2'-O-methylcytidine-3'-phosphorothioate
  modified_base 23: mod_base = OTHER; note = 2'-O-methylguanosine
aaaagttcaaatatccggaaccg

SEQ ID NO: 212 - RNA, 23 nt, synthetic construct
  source 1..23: mol_type = other RNA
  modified_base 1: mod_base = OTHER; note = 2'-O-methyladenosine-3'-phosphorothioate
  modified_base 2: mod_base = OTHER; note = 2'-deoxy-2'-fluoroadenosine-3'-phosphorothioate
  modified_base 3: mod_base = OTHER; note = 2'-O-methyladenosine-3'-phosphate
  modified_base 4: mod_base = OTHER; note = 2'-deoxy-2'-fluoroadenosine-3'-phosphorothioate
  modified_base 5: mod_base = OTHER; note = 2'-O-methylguanosine-3'-phosphate
  modified_base 6: mod_base = OTHER; note = 2'-deoxy-2'-fluorouridine-3'-phosphorothioate
  modified_base 7: mod_base = OTHER; note = 2'-O-methyluridine-3'-phosphate
  modified_base 8: mod_base = OTHER; note = 2'-deoxy-2'-fluorocytidine-3'-phosphorothioate
  modified_base 9: mod_base = OTHER; note = 2'-O-methyladenosine-3'-phosphate
  modified_base 10: mod_base = OTHER; note = 2'-deoxy-2'-fluoroadenosine-3'-phosphorothioate
  modified_base 11: mod_base = OTHER; note = 2'-O-methyladenosine-3'-phosphate
  modified_base 12: mod_base = OTHER; note = 2'-O-methyluridine-3'-phosphate
  modified_base 13: mod_base = OTHER; note = 2'-O-methyladenosine-3'-phosphate
  modified_base 14: mod_base = OTHER; note = 2'-deoxy-2'-fluorouridine-3'-phosphorothioate
  modified_base 15: mod_base = OTHER; note = 2'-O-methylcytidine-3'-phosphate
  modified_base 16: mod_base = OTHER; note = 2'-deoxy-2'-fluorocytidine-3'-phosphorothioate
  modified_base 17: mod_base = OTHER; note = 2'-O-methylguanosine-3'-phosphate
  modified_base 18: mod_base = OTHER; note = 2'-deoxy-2'-fluoroguanosine-3'-phosphorothioate
  modified_base 19: mod_base = OTHER; note = 2'-O-methyladenosine-3'-phosphate
  modified_base 20: mod_base = OTHER; note = 2'-deoxy-2'-fluoroadenosine-3'-phosphorothioate
  modified_base 21: mod_base = OTHER; note = 2'-O-methylcytidine-3'-phosphorothioate
  modified_base 22: mod_base = OTHER; note = 2'-O-methylcytidine-3'-phosphorothioate
  modified_base 23: mod_base = OTHER; note = 2'-O-methylguanosine
aaaagttcaaatatccggaaccg

SEQ ID NO: 213 - RNA, 23 nt, synthetic construct
  source 1..23: mol_type = other RNA
  modified_base 1: mod_base = OTHER; note = 2'-O-methyluridine-3'-phosphorothioate
  modified_base 2: mod_base = OTHER; note = 2'-deoxy-2'-fluoroguanosine-3'-phosphorothioate
  modified_base 3: mod_base = OTHER; note = 2'-O-methyladenosine-3'-phosphate
  modified_base 4: mod_base = OTHER; note = 2'-deoxy-2'-fluoroadenosine-3'-phosphate
  modified_base 5: mod_base = OTHER; note = 2'-O-methyladenosine-3'-phosphate
  modified_base 6: mod_base = OTHER; note = 2'-deoxy-2'-fluorouridine-3'-phosphate
  modified_base 7: mod_base = OTHER; note = 2'-O-methyluridine-3'-phosphate
  modified_base 8: mod_base = OTHER; note = 2'-deoxy-2'-fluoroguanosine-3'-phosphate
  modified_base 9: mod_base = OTHER; note = 2'-O-methyluridine-3'-phosphate
  modified_base 10: mod_base = OTHER; note = 2'-deoxy-2'-fluoroguanosine-3'-phosphate
  modified_base 11: mod_base = OTHER; note = 2'-O-methyluridine-3'-phosphate
  modified_base 12: mod_base = OTHER; note = 2'-O-methyluridine-3'-phosphate
  modified_base 13: mod_base = OTHER; note = 2'-O-methyluridine-3'-phosphate
  modified_base 14: mod_base = OTHER; note = 2'-deoxy-2'-fluoroguanosine-3'-phosphate
  modified_base 15: mod_base = OTHER; note = 2'-O-methyladenosine-3'-phosphate
  modified_base 16: mod_base = OTHER; note = 2'-deoxy-2'-fluorouridine-3'-phosphate
  modified_base 17: mod_base = OTHER; note = 2'-O-methylcytidine-3'-phosphate
  modified_base 18: mod_base = OTHER; note = 2'-deoxy-2'-fluorouridine-3'-phosphate
  modified_base 19: mod_base = OTHER; note = 2'-O-methylguanosine-3'-phosphate
  modified_base 20: mod_base = OTHER; note = 2'-deoxy-2'-fluorocytidine-3'-phosphate
  modified_base 21: mod_base = OTHER; note = 2'-O-methyladenosine-3'-phosphorothioate
  modified_base 22: mod_base = OTHER; note = 2'-O-methylguanosine-3'-phosphorothioate
  modified_base 23: mod_base = OTHER; note = 2'-O-methyladenosine
tgaaattgtgtttgatctgcaga

SEQ ID NO: 214 - RNA, 23 nt, synthetic construct
  source 1..23: mol_type = other RNA
  modified_base 1: mod_base = OTHER; note = 2'-O-methyluridine-3'-phosphorothioate
  modified_base 2: mod_base = OTHER; note = 2'-deoxy-2'-fluoroguanosine-3'-phosphorothioate
  modified_base 3: mod_base = OTHER; note = 2'-O-methyladenosine-3'-phosphate
  modified_base 4: mod_base = OTHER; note = 2'-deoxy-2'-fluoroadenosine-3'-phosphorothioate
  modified_base 5: mod_base = OTHER; note = 2'-O-methyladenosine-3'-phosphate
  modified_base 6: mod_base = OTHER; note = 2'-deoxy-2'-fluorouridine-3'-phosphorothioate
  modified_base 7: mod_base = OTHER; note = 2'-O-methyluridine-3'-phosphate
  modified_base 8: mod_base = OTHER; note = 2'-deoxy-2'-fluoroguanosine-3'-phosphorothioate
  modified_base 9: mod_base = OTHER; note = 2'-O-methyluridine-3'-phosphate
  modified_base 10: mod_base = OTHER; note = 2'-deoxy-2'-fluoroguanosine-3'-phosphorothioate
  modified_base 11: mod_base = OTHER; note = 2'-O-methyluridine-3'-phosphate
  modified_base 12: mod_base = OTHER; note = 2'-O-methyluridine-3'-phosphate
  modified_base 13: mod_base = OTHER; note = 2'-O-methyluridine-3'-phosphate
  modified_base 14: mod_base = OTHER; note = 2'-deoxy-2'-fluoroguanosine-3'-phosphorothioate
  modified_base 15: mod_base = OTHER; note = 2'-O-methyladenosine-3'-phosphate
  modified_base 16: mod_base = OTHER; note = 2'-deoxy-2'-fluorouridine-3'-phosphorothioate
  modified_base 17: mod_base = OTHER; note = 2'-O-methylcytidine-3'-phosphate
  modified_base 18: mod_base = OTHER; note = 2'-deoxy-2'-fluorouridine-3'-phosphorothioate
  modified_base 19: mod_base = OTHER; note = 2'-O-methylguanosine-3'-phosphate
  modified_base 20: mod_base = OTHER; note = 2'-deoxy-2'-fluorocytidine-3'-phosphorothioate
  modified_base 21: mod_base = OTHER; note = 2'-O-methyladenosine-3'-phosphorothioate
  modified_base 22: mod_base = OTHER; note = 2'-O-methylguanosine-3'-phosphorothioate
  modified_base 23: mod_base = OTHER; note = 2'-O-methyladenosine
tgaaattgtgtttgatctgcaga

SEQ ID NO: 215 - RNA, 23 nt, synthetic construct
  source 1..23: mol_type = other RNA
  modified_base 1: mod_base = OTHER; note = 2'-O-methyluridine-3'-phosphorothioate
  modified_base 2: mod_base = OTHER; note = 2'-deoxy-2'-fluoroadenosine-3'-phosphorothioate
  modified_base 3: mod_base = OTHER; note = 2'-O-methyluridine-3'-phosphate
  modified_base 4: mod_base = OTHER; note = 2'-deoxy-2'-fluorouridine-3'-phosphate
  modified_base 5: mod_base = OTHER; note = 2'-O-methyladenosine-3'-phosphate
  modified_base 6: mod_base = OTHER; note = 2'-deoxy-2'-fluorouridine-3'-phosphate
  modified_base 7: mod_base = OTHER; note = 2'-O-methyladenosine-3'-phosphate
  modified_base 8: mod_base = OTHER; note = 2'-deoxy-2'-fluoroadenosine-3'-phosphate
  modified_base 9: mod_base = OTHER; note = 2'-O-methyladenosine-3'-phosphate
  modified_base 10: mod_base = OTHER; note = 2'-deoxy-2'-fluoroadenosine-3'-phosphate
  modified_base 11: mod_base = OTHER; note = 2'-O-methyladenosine-3'-phosphate
  modified_base 12: mod_base = OTHER; note = 2'-O-methyluridine-3'-phosphate
  modified_base 13: mod_base = OTHER; note = 2'-O-methyladenosine-3'-phosphate
  modified_base 14: mod_base = OTHER; note = 2'-deoxy-2'-fluorouridine-3'-phosphate
  modified_base 15: mod_base = OTHER; note = 2'-O-methylcytidine-3'-phosphate
  modified_base 16: mod_base = OTHER; note = 2'-deoxy-2'-fluorouridine-3'-phosphate
  modified_base 17: mod_base = OTHER; note = 2'-O-methyluridine-3'-phosphate
  modified_base 18: mod_base = OTHER; note = 2'-deoxy-2'-fluoroguanosine-3'-phosphate
  modified_base 19: mod_base = OTHER; note = 2'-O-methylcytidine-3'-phosphate
  modified_base 20: mod_base = OTHER; note = 2'-deoxy-2'-fluorouridine-3'-phosphate
  modified_base 21: mod_base = OTHER; note = 2'-O-methyluridine-3'-phosphorothioate
  modified_base 22: mod_base = OTHER; note = 2'-O-methyluridine-3'-phosphorothioate
  modified_base 23: mod_base = OTHER; note = 2'-O-methyluridine
tattataaaaatatcttgctttt

SEQ ID NO: 216 - RNA, 23 nt, synthetic construct
  source 1..23: mol_type = other RNA
  modified_base 1: mod_base = OTHER; note = 2'-O-methyluridine-3'-phosphorothioate
  modified_base 2: mod_base = OTHER; note = 2'-deoxy-2'-fluoroadenosine-3'-phosphorothioate
  modified_base 3: mod_base = OTHER; note = 2'-O-methyluridine-3'-phosphate
  modified_base 4: mod_base = OTHER; note = 2'-deoxy-2'-fluorouridine-3'-phosphorothioate
  modified_base 5: mod_base = OTHER; note = 2'-O-methyladenosine-3'-phosphate
  modified_base 6: mod_base = OTHER; note = 2'-deoxy-2'-fluorouridine-3'-phosphorothioate
  modified_base 7: mod_base = OTHER; note = 2'-O-methyladenosine-3'-phosphate
  modified_base 8: mod_base = OTHER; note = 2'-deoxy-2'-fluoroadenosine-3'-phosphorothioate
  modified_base 9: mod_base = OTHER; note = 2'-O-methyladenosine-3'-phosphate
  modified_base 10: mod_base = OTHER; note = 2'-deoxy-2'-fluoroadenosine-3'-phosphorothioate
  modified_base 11: mod_base = OTHER; note = 2'-O-methyladenosine-3'-phosphate
  modified_base 12: mod_base = OTHER; note = 2'-O-methyluridine-3'-phosphate
  modified_base 13: mod_base = OTHER; note = 2'-O-methyladenosine-3'-phosphate
  modified_base 14: mod_base = OTHER; note = 2'-deoxy-2'-fluorouridine-3'-phosphorothioate
  modified_base 15: mod_base = OTHER; note = 2'-O-methylcytidine-3'-phosphate
  modified_base 16: mod_base = OTHER; note = 2'-deoxy-2'-fluorouridine-3'-phosphorothioate
  modified_base 17: mod_base = OTHER; note = 2'-O-methyluridine-3'-phosphate
  modified_base 18: mod_base = OTHER; note = 2'-deoxy-2'-fluoroguanosine-3'-phosphorothioate
  modified_base 19: mod_base = OTHER; note = 2'-O-methylcytidine-3'-phosphate
  modified_base 20: mod_base = OTHER; note = 2'-deoxy-2'-fluorouridine-3'-phosphorothioate
  modified_base 21: mod_base = OTHER; note = 2'-O-methyluridine-3'-phosphorothioate
  modified_base 22: mod_base = OTHER; note = 2'-O-methyluridine-3'-phosphorothioate
  modified_base 23: mod_base = OTHER; note = 2'-O-methyluridine
tattataaaaatatcttgctttt

SEQ ID NO: 217 - RNA, 23 nt, synthetic construct
  source 1..23: mol_type = other RNA
  modified_base 1: mod_base = OTHER; note = 2'-O-methyladenosine-3'-phosphorothioate
  modified_base 2: mod_base = OTHER; note = 2'-deoxy-2'-fluorocytidine-3'-phosphorothioate
  modified_base 3: mod_base = OTHER; note = 2'-O-methyluridine-3'-phosphate
  modified_base 4: mod_base = OTHER; note = 2'-deoxy-2'-fluoroguanosine-3'-phosphate
  modified_base 5: mod_base = OTHER; note = 2'-O-methyladenosine-3'-phosphate
  modified_base 6: mod_base = OTHER; note = 2'-deoxy-2'-fluoroadenosine-3'-phosphate
  modified_base 7: mod_base = OTHER; note = 2'-O-methyladenosine-3'-phosphate
  modified_base 8: mod_base = OTHER; note = 2'-deoxy-2'-fluorouridine-3'-phosphate
  modified_base 9: mod_base = OTHER; note = 2'-O-methyluridine-3'-phosphate
  modified_base 10: mod_base = OTHER; note = 2'-deoxy-2'-fluoroguanosine-3'-phosphate
  modified_base 11: mod_base = OTHER; note = 2'-O-methyluridine-3'-phosphate
  modified_base 12: mod_base = OTHER; note = 2'-O-methylguanosine-3'-phosphate
  modified_base 13: mod_base = OTHER; note = 2'-O-methyluridine-3'-phosphate
  modified_base 14: mod_base = OTHER; note = 2'-deoxy-2'-fluorouridine-3'-phosphate
  modified_base 15: mod_base = OTHER; note = 2'-O-methyluridine-3'-phosphate
  modified_base 16: mod_base = OTHER; note = 2'-deoxy-2'-fluoroguanosine-3'-phosphate
  modified_base 17: mod_base = OTHER; note = 2'-O-methyladenosine-3'-phosphate
  modified_base 18: mod_base = OTHER; note = 2'-deoxy-2'-fluorouridine-3'-phosphate
  modified_base 19: mod_base = OTHER; note = 2'-O-methylcytidine-3'-phosphate
  modified_base 20: mod_base = OTHER; note = 2'-deoxy-2'-fluorouridine-3'-phosphate
  modified_base 21: mod_base = OTHER; note = 2'-O-methylguanosine-3'-phosphorothioate
  modified_base 22: mod_base = OTHER; note = 2'-O-methylcytidine-3'-phosphorothioate
  modified_base 23: mod_base = OTHER; note = 2'-O-methyladenosine
actgaaattgtgtttgatctgca

SEQ ID NO: 218 - RNA, 23 nt, synthetic construct
  source 1..23: mol_type = other RNA
  modified_base 1: mod_base = OTHER; note = 2'-O-methyladenosine-3'-phosphorothioate
  modified_base 2: mod_base = OTHER; note = 2'-deoxy-2'-fluorocytidine-3'-phosphorothioate
  modified_base 3: mod_base = OTHER; note = 2'-O-methyluridine-3'-phosphate
  modified_base 4: mod_base = OTHER; note = 2'-deoxy-2'-fluoroguanosine-3'-phosphorothioate
  modified_base 5: mod_base = OTHER; note = 2'-O-methyladenosine-3'-phosphate
  modified_base 6: mod_base = OTHER; note = 2'-deoxy-2'-fluoroadenosine-3'-phosphorothioate
  modified_base 7: mod_base = OTHER; note = 2'-O-methyladenosine-3'-phosphate
  modified_base 8: mod_base = OTHER; note = 2'-deoxy-2'-fluorouridine-3'-phosphorothioate
  modified_base 9: mod_base = OTHER; note = 2'-O-methyluridine-3'-phosphate
  modified_base 10: mod_base = OTHER; note = 2'-deoxy-2'-fluoroguanosine-3'-phosphorothioate
  modified_base 11: mod_base = OTHER; note = 2'-O-methyluridine-3'-phosphate
  modified_base 12: mod_base = OTHER; note = 2'-O-methylguanosine-3'-phosphate
  modified_base 13: mod_base = OTHER; note = 2'-O-methyluridine-3'-phosphate
  modified_base 14: mod_base = OTHER; note = 2'-deoxy-2'-fluorouridine-3'-phosphorothioate
  modified_base 15: mod_base = OTHER; note = 2'-O-methyluridine-3'-phosphate
  modified_base 16: mod_base = OTHER; note = 2'-deoxy-2'-fluoroguanosine-3'-phosphorothioate
  modified_base 17: mod_base = OTHER; note = 2'-O-methyladenosine-3'-phosphate
  modified_base 18: mod_base = OTHER; note = 2'-deoxy-2'-fluorouridine-3'-phosphorothioate
  modified_base 19: mod_base = OTHER; note = 2'-O-methylcytidine-3'-phosphate
  modified_base 20: mod_base = OTHER; note = 2'-deoxy-2'-fluorouridine-3'-phosphorothioate
  modified_base 21: mod_base = OTHER; note = 2'-O-methylguanosine-3'-phosphorothioate
  modified_base 22: mod_base = OTHER; note = 2'-O-methylcytidine-3'-phosphorothioate
  modified_base 23: mod_base = OTHER; note = 2'-O-methyladenosine
actgaaattgtgtttgatctgca

SEQ ID NO: 219 - RNA, 19 nt, synthetic construct
  source 1..19: mol_type = other RNA
cactataattacttgattt

SEQ ID NO: 220 - RNA, 19 nt, synthetic construct
  source 1..19: mol_type = other RNA
taactcactataattactt

SEQ ID NO: 221 - RNA, 19 nt, synthetic construct
  source 1..19: mol_type = other RNA
acaaaataactcactataa

SEQ ID NO: 222 - RNA, 19 nt, synthetic construct
  source 1..19: mol_type = other RNA
tcctctggaaattggcctt

SEQ ID NO: 223 - RNA, 19 nt, synthetic construct
  source 1..19: mol_type = other RNA
caaaataactcactataat

SEQ ID NO: 224 - RNA, 19 nt, synthetic construct
  source 1..19: mol_type = other RNA
ctctggaaattggccttca

SEQ ID NO: 225 - RNA, 19 nt, synthetic construct
  source 1..19: mol_type = other RNA
gcaagatatttttataata

SEQ ID NO: 226 - RNA, 19 nt, synthetic construct
  source 1..19: mol_type = other RNA
aatgtttttgtcaagtaca

SEQ ID NO: 227 - RNA, 19 nt, synthetic construct
  source 1..19: mol_type = other RNA
ttaaacaacaagtaccttt

SEQ ID NO: 228 - RNA, 19 nt, synthetic construct
  source 1..19: mol_type = other RNA
tcagaaagtctgtgaagga

SEQ ID NO: 229 - RNA, 19 nt, synthetic construct
  source 1..19: mol_type = other RNA
actgaagcatttgatgcaa

SEQ ID NO: 230 - RNA, 19 nt, synthetic construct
  source 1..19: mol_type = other RNA
agttctgtgttaaaatgtc

SEQ ID NO: 231 - RNA, 19 nt, synthetic construct
  source 1..19: mol_type = other RNA
gattttgagtgtaaaagga

SEQ ID NO: 232 - RNA, 19 nt, synthetic construct
  source 1..19: mol_type = other RNA
tgatgaaccttgtaaagaa

SEQ ID NO: 233 - RNA, 19 nt, synthetic construct
  source 1..19: mol_type = other RNA
cattggaacatttttcatt

SEQ ID NO: 234 - RNA, 19 nt, synthetic construct
  source 1..19: mol_type = other RNA
ccagaaattcggagttatt

SEQ ID NO: 235 - RNA, 19 nt, synthetic construct
  source 1..19: mol_type = other RNA
cctgggagataaaactcac

SEQ ID NO: 236 - RNA, 19 nt, synthetic construct
  source 1..19: mol_type = other RNA
aaatgatgaaccttgtaaa

SEQ ID NO: 237 - RNA, 19 nt, synthetic construct
  source 1..19: mol_type = other RNA
tgctcaagtcacatttgat

SEQ ID NO: 238 - RNA, 19 nt, synthetic construct
  source 1..19: mol_type = other RNA
gattgcatatgcttataaa

SEQ ID NO: 239 - RNA, 19 nt, synthetic construct
  source 1..19: mol_type = other RNA
tatcctgataaaaaattta

SEQ ID NO: 240 - RNA, 19 nt, synthetic construct
  source 1..19: mol_type = other RNA
gaagtttgcagcttttatt

SEQ ID NO: 241 - RNA, 19 nt, synthetic construct
  source 1..19: mol_type = other RNA
agaaattgatcatattgga

SEQ ID NO: 242 - RNA, 19 nt, synthetic construct
  source 1..19: mol_type = other RNA
cctgataaaaaatttagtt

SEQ ID NO: 243 - RNA, 19 nt, synthetic construct
  source 1..19: mol_type = other RNA
gaaaagaaatcttagtaaa

SEQ ID NO: 244 - RNA, 19 nt, synthetic construct
  source 1..19: mol_type = other RNA
ttatcaaagtataaacatt

SEQ ID NO: 245 - RNA, 19 nt, synthetic construct
  source 1..19: mol_type = other RNA
cctacaaactgaatttggt

SEQ ID NO: 246 - RNA, 19 nt, synthetic construct
  source 1..19: mol_type = other RNA
ggagcaaacatatgtcatt

SEQ ID NO: 247 - RNA, 19 nt, synthetic construct
  source 1..19: mol_type = other RNA
atgtaacaactgtagttca

SEQ ID NO: 248 - RNA, 19 nt, synthetic construct
  source 1..19: mol_type = other RNA
ggaaatcattggaacattt

SEQ ID NO: 249 - RNA, 19 nt, synthetic construct
  source 1..19: mol_type = other RNA
taagaattttgaaattact

SEQ ID NO: 250 - RNA, 19 nt, synthetic construct
  source 1..19: mol_type = other RNA
ttctgcaactgaattcgat

SEQ ID NO: 251 - RNA, 19 nt, synthetic construct
  source 1..19: mol_type = other RNA
ccttggaaagagtatttca

SEQ ID NO: 252 - RNA, 19 nt, synthetic construct
  source 1..19: mol_type = other RNA
tgataaaaaatttagttac

SEQ ID NO: 253 - RNA, 19 nt, synthetic construct
  source 1..19: mol_type = other RNA
cttggaaagagtatttcaa

SEQ ID NO: 254 - RNA, 19 nt, synthetic construct
  source 1..19: mol_type = other RNA
cactataattacttgattt

SEQ ID NO: 255 - RNA, 19 nt, synthetic construct
  source 1..19: mol_type = other RNA
taactcactataattactt

SEQ ID NO: 256 - RNA, 19 nt, synthetic construct
  source 1..19: mol_type = other RNA
acaaaataactcactataa

SEQ ID NO: 257 - RNA, 19 nt, synthetic construct
  source 1..19: mol_type = other RNA
tcctctggaaattggcctt

SEQ ID NO: 258 - RNA, 19 nt, synthetic construct
  source 1..19: mol_type = other RNA
caaaataactcactataat

SEQ ID NO: 259 - RNA, 19 nt, synthetic construct
  source 1..19: mol_type = other RNA
ctctggaaattggccttca

SEQ ID NO: 260 - RNA, 19 nt, synthetic construct
  source 1..19: mol_type = other RNA
gcaagatatttttataata

SEQ ID NO: 261 - RNA, 19 nt, synthetic construct
  source 1..19: mol_type = other RNA
aatgtttttgtcaagtaca

SEQ ID NO: 262 - RNA, 19 nt, synthetic construct
  source 1..19: mol_type = other RNA
ttaaacaacaagtaccttt

SEQ ID NO: 263 - RNA, 19 nt, synthetic construct
  source 1..19: mol_type = other RNA
tcagaaagtctgtgaagga

SEQ ID NO: 264 - RNA, 19 nt, synthetic construct
  source 1..19: mol_type = other RNA
actgaagcatttgatgcaa

SEQ ID NO: 265 - RNA, 19 nt, synthetic construct
  source 1..19: mol_type = other RNA
agttctgtgttaaaatgtc

SEQ ID NO: 266 - RNA, 19 nt, synthetic construct
  source 1..19: mol_type = other RNA
cactataattacttgattt

SEQ ID NO: 267 - RNA, 19 nt, synthetic construct
  source 1..19: mol_type = other RNA
taactcactataattactt

SEQ ID NO: 268 - RNA, 19 nt, synthetic construct
  source 1..19: mol_type = other RNA
acaaaataactcactataa

SEQ ID NO: 269 - RNA, 19 nt, synthetic construct
  source 1..19: mol_type = other RNA
tcctctggaaattggcctt

SEQ ID NO: 270 - RNA, 19 nt, synthetic construct
  source 1..19: mol_type = other RNA
caaaataactcactataat

SEQ ID NO: 271 - RNA, 19 nt, synthetic construct
  source 1..19: mol_type = other RNA
ctctggaaattggccttca

SEQ ID NO: 272 - RNA, 19 nt, synthetic construct
  source 1..19: mol_type = other RNA
gcaagatatttttataata

SEQ ID NO: 273 - RNA, 19 nt, synthetic construct
  source 1..19: mol_type = other RNA
aatgtttttgtcaagtaca

SEQ ID NO: 274 - RNA, 19 nt, synthetic construct
  source 1..19: mol_type = other RNA
ttaaacaacaagtaccttt

SEQ ID NO: 275 - RNA, 19 nt, synthetic construct
  source 1..19: mol_type = other RNA
tcagaaagtctgtgaagga

SEQ ID NO: 276 - RNA, 19 nt, synthetic construct
  source 1..19: mol_type = other RNA
actgaagcatttgatgcaa

SEQ ID NO: 277 - RNA, 19 nt, synthetic construct
  source 1..19: mol_type = other RNA
agttctgtgttaaaatgtc

SEQ ID NO: 278 - RNA, 19 nt, synthetic construct
  source 1..19: mol_type = other RNA
cactataattacttgattt

SEQ ID NO: 279 - RNA, 19 nt, synthetic construct
  source 1..19: mol_type = other RNA
taactcactataattactt

SEQ ID NO: 280 - RNA, 19 nt, synthetic construct
  source 1..19: mol_type = other RNA
acaaaataactcactataa

SEQ ID NO: 281 - RNA, 19 nt, synthetic construct
  source 1..19: mol_type = other RNA
tcctctggaaattggcctt

SEQ ID NO: 282 - RNA, 19 nt, synthetic construct
  source 1..19: mol_type = other RNA
caaaataactcactataat

SEQ ID NO: 283 - RNA, 19 nt, synthetic construct
  source 1..19: mol_type = other RNA
ctctggaaattggccttca

SEQ ID NO: 284 - RNA, 19 nt, synthetic construct
  source 1..19: mol_type = other RNA
gcaagatatttttataata

SEQ ID NO: 285 - RNA, 19 nt, synthetic construct
  source 1..19: mol_type = other RNA
aatgtttttgtcaagtaca

SEQ ID NO: 286 - RNA, 19 nt, synthetic construct
  source 1..19: mol_type = other RNA
ttaaacaacaagtaccttt

SEQ ID NO: 287 - RNA, 19 nt, synthetic construct
  source 1..19: mol_type = other RNA
tcagaaagtctgtgaagga

SEQ ID NO: 288 - RNA, 19 nt, synthetic construct
  source 1..19: mol_type = other RNA
actgaagcatttgatgcaa

SEQ ID NO: 289 - RNA, 19 nt, synthetic construct
  source 1..19: mol_type = other RNA
agttctgtgttaaaatgtc

SEQ ID NO: 290 - RNA, 19 nt, synthetic construct
  source 1..19: mol_type = other RNA
cactataattacttgattt

SEQ ID NO: 291 - RNA, 19 nt, synthetic construct
  source 1..19: mol_type = other RNA
taactcactataattactt

SEQ ID NO: 292 - RNA, 19 nt, synthetic construct
  source 1..19: mol_type = other RNA
acaaaataactcactataa

SEQ ID NO: 293 - RNA, 19 nt, synthetic construct
  source 1..19: mol_type = other RNA
tcctctggaaattggcctt

SEQ ID NO: 294 - RNA, 19 nt, synthetic construct
  source 1..19: mol_type = other RNA
caaaataactcactataat

SEQ ID NO: 295 - RNA, 19 nt, synthetic construct
  source 1..19: mol_type = other RNA
ctctggaaattggccttca

SEQ ID NO: 296 - RNA, 19 nt, synthetic construct
  source 1..19: mol_type = other RNA
gcaagatatttttataata

SEQ ID NO: 297 - RNA, 19 nt, synthetic construct
  source 1..19: mol_type = other RNA
aatgtttttgtcaagtaca

SEQ ID NO: 298 - RNA, 19 nt, synthetic construct
  source 1..19: mol_type = other RNA
ttaaacaacaagtaccttt

SEQ ID NO: 299 - RNA, 19 nt, synthetic construct
  source 1..19: mol_type = other RNA
tcagaaagtctgtgaagga

SEQ ID NO: 300 - RNA, 19 nt, synthetic construct
  source 1..19: mol_type = other RNA
actgaagcatttgatgcaa

SEQ ID NO: 301 - RNA, 19 nt, synthetic construct
  source 1..19: mol_type = other RNA
agttctgtgttaaaatgtc

SEQ ID NO: 302 - RNA, 19 nt, synthetic construct
  source 1..19: mol_type = other RNA
aaatcaagtaattatagtg

SEQ ID NO: 303 - RNA, 19 nt, synthetic construct
  source 1..19: mol_type = other RNA
aagtaattatagtgagtta

SEQ ID NO: 304 - RNA, 19 nt, synthetic construct
  source 1..19: mol_type = other RNA
ttatagtgagttattttgt

SEQ ID NO: 305 - RNA, 19 nt, synthetic construct
  source 1..19: mol_type = other RNA
aaggccaatttccagagga

SEQ ID NO: 306 - RNA, 19 nt, synthetic construct
  source 1..19: mol_type = other RNA
attatagtgagttattttg

SEQ ID NO: 307 - RNA, 19 nt, synthetic construct
  source 1..19: mol_type = other RNA
tgaaggccaatttccagag

SEQ ID NO: 308 - RNA, 19 nt, synthetic construct
  source 1..19: mol_type = other RNA
tattataaaaatatcttgc

SEQ ID NO: 309 - RNA, 19 nt, synthetic construct
  source 1..19: mol_type = other RNA
tgtacttgacaaaaacatt

SEQ ID NO: 310 - RNA, 19 nt, synthetic construct
  source 1..19: mol_type = other RNA
aaaggtacttgttgtttaa

SEQ ID NO: 311 - RNA, 19 nt, synthetic construct
  source 1..19: mol_type = other RNA
tccttcacagactttctga

SEQ ID NO: 312 - RNA, 19 nt, synthetic construct
  source 1..19: mol_type = other RNA
ttgcatcaaatgcttcagt

SEQ ID NO: 313 - RNA, 19 nt, synthetic construct
  source 1..19: mol_type = other RNA
gacattttaacacagaact

SEQ ID NO: 314 - RNA, 19 nt, synthetic construct
  source 1..19: mol_type = other RNA
tccttttacactcaaaatc

SEQ ID NO: 315 - RNA, 19 nt, synthetic construct
  source 1..19: mol_type = other RNA
ttctttacaaggttcatca

SEQ ID NO: 316 - RNA, 19 nt, synthetic construct
  source 1..19: mol_type = other RNA
aatgaaaaatgttccaatg

SEQ ID NO: 317 - RNA, 19 nt, synthetic construct
  source 1..19: mol_type = other RNA
aataactccgaatttctgg

SEQ ID NO: 318 - RNA, 19 nt, synthetic construct
  source 1..19: mol_type = other RNA
gtgagttttatctcccagg

SEQ ID NO: 319 - RNA, 19 nt, synthetic construct
  source 1..19: mol_type = other RNA
tttacaaggttcatcattt

SEQ ID NO: 320 - RNA, 19 nt, synthetic construct
  source 1..19: mol_type = other RNA
atcaaatgtgacttgagca

SEQ ID NO: 321 - RNA, 19 nt, synthetic construct
  source 1..19: mol_type = other RNA
tttataagcatatgcaatc

SEQ ID NO: 322 - RNA, 19 nt, synthetic construct
  source 1..19: mol_type = other RNA
taaattttttatcaggata

SEQ ID NO: 323 - RNA, 19 nt, synthetic construct
  source 1..19: mol_type = other RNA
aataaaagctgcaaacttc

SEQ ID NO: 324 - RNA, 19 nt, synthetic construct
  source 1..19: mol_type = other RNA
tccaatatgatcaatttct

SEQ ID NO: 325 - RNA, 19 nt, synthetic construct
  source 1..19: mol_type = other RNA
aactaaattttttatcagg

SEQ ID NO: 326 - RNA, 19 nt, synthetic construct
  source 1..19: mol_type = other RNA
tttactaagatttcttttc

SEQ ID NO: 327 - RNA, 19 nt, synthetic construct
  source 1..19: mol_type = other RNA
aatgtttatactttgataa

SEQ ID NO: 328 - RNA, 19 nt, synthetic construct
  source 1..19: mol_type = other RNA
accaaattcagtttgtagg

SEQ ID NO: 329 - RNA, 19 nt, synthetic construct
  source 1..19: mol_type = other RNA
aatgacatatgtttgctcc

SEQ ID NO: 330 - RNA, 19 nt, synthetic construct
  source 1..19: mol_type = other RNA
tgaactacagttgttacat

SEQ ID NO: 331 - RNA, 19 nt, synthetic construct
  source 1..19: mol_type = other RNA
aaatgttccaatgatttcc

SEQ ID NO: 332 - RNA, 19 nt, synthetic construct
  source 1..19: mol_type = other RNA
agtaatttcaaaattctta

SEQ ID NO: 333 - RNA, 19 nt, synthetic construct
  source 1..19: mol_type = other RNA
atcgaattcagttgcagaa

SEQ ID NO: 334 - RNA, 19 nt, synthetic construct
  source 1..19: mol_type = other RNA
tgaaatactctttccaagg

SEQ ID NO: 335 - RNA, 19 nt, synthetic construct
  source 1..19: mol_type = other RNA
gtaactaaattttttatca

SEQ ID NO: 336 - RNA, 19 nt, synthetic construct
  source 1..19: mol_type = other RNA
ttgaaatactctttccaag

SEQ ID NO: 337 - RNA, 19 nt, synthetic construct
  source 1..19: mol_type = other RNA
aaatcaagtaattatagtg

SEQ ID NO: 338 - RNA, 19 nt, synthetic construct
  source 1..19: mol_type = other RNA
aagtaattatagtgagtta

SEQ ID NO: 339 - RNA, 19 nt, synthetic construct
  source 1..19: mol_type = other RNA
ttatagtgagttattttgt

SEQ ID NO: 340 - RNA, 19 nt, synthetic construct
  source 1..19: mol_type = other RNA
aaggccaatttccagagga

SEQ ID NO: 341 - RNA, 19 nt, synthetic construct
  source 1..19: mol_type = other RNA
attatagtgagttattttg

SEQ ID NO: 342 - RNA, 19 nt, synthetic construct
  source 1..19: mol_type = other RNA
tgaaggccaatttccagag

SEQ ID NO: 343 - RNA, 19 nt, synthetic construct
  source 1..19: mol_type = other RNA
tattataaaaatatcttgc

SEQ ID NO: 344 - RNA, 19 nt, synthetic construct
  source 1..19: mol_type = other RNA
tgtacttgacaaaaacatt

SEQ ID NO: 345 - RNA, 19 nt, synthetic construct
  source 1..19: mol_type = other RNA
aaaggtacttgttgtttaa

SEQ ID NO: 346 - RNA, 19 nt, synthetic construct
  source 1..19: mol_type = other RNA
tccttcacagactttctga

SEQ ID NO: 347 - RNA, 19 nt, synthetic construct
  source 1..19: mol_type = other RNA
ttgcatcaaatgcttcagt

SEQ ID NO: 348 - RNA, 19 nt, synthetic construct
  source 1..19: mol_type = other RNA
gacattttaacacagaact

SEQ ID NO: 349 - RNA, 19 nt, synthetic construct
  source 1..19: mol_type = other RNA
aaatcaagtaattatagtg

SEQ ID NO: 350 - RNA, 19 nt, synthetic construct
  source 1..19: mol_type = other RNA
aagtaattatagtgagtta

SEQ ID NO: 351 - RNA, 19 nt, synthetic construct
  source 1..19: mol_type = other RNA
ttatagtgagttattttgt

SEQ ID NO: 352 - RNA, 19 nt, synthetic construct
  source 1..19: mol_type = other RNA
aaggccaatttccagagga

SEQ ID NO: 353 - RNA, 19 nt, synthetic construct
  source 1..19: mol_type = other RNA
attatagtgagttattttg

SEQ ID NO: 354 - RNA, 19 nt, synthetic construct
  source 1..19: mol_type = other RNA
tgaaggccaatttccagag

SEQ ID NO: 355 - RNA, 19 nt, synthetic construct
  source 1..19: mol_type = other RNA
tattataaaaatatcttgc

SEQ ID NO: 356 - RNA, 19 nt, synthetic construct
  source 1..19: mol_type = other RNA
tgtacttgacaaaaacatt

SEQ ID NO: 357 - RNA, 19 nt, synthetic construct
  source 1..19: mol_type = other RNA
aaaggtacttgttgtttaa

SEQ ID NO: 358 - RNA, 19 nt, synthetic construct
  source 1..19: mol_type = other RNA
tccttcacagactttctga

SEQ ID NO: 359 - RNA, 19 nt, synthetic construct
  source 1..19: mol_type = other RNA
ttgcatcaaatgcttcagt

SEQ ID NO: 360 - RNA, 19 nt, synthetic construct
  source 1..19: mol_type = other RNA
gacattttaacacagaact

SEQ ID NO: 361 - RNA, 19 nt, synthetic construct
  source 1..19: mol_type = other RNA
aaatcaagtaattatagtg

SEQ ID NO: 362 - RNA, 19 nt, synthetic construct
  source 1..19: mol_type = other RNA
aagtaattatagtgagtta

SEQ ID NO: 363 - RNA, 19 nt, synthetic construct
  source 1..19: mol_type = other RNA
ttatagtgagttattttgt

SEQ ID NO: 364 - RNA, 19 nt, synthetic construct
  source 1..19: mol_type = other RNA
aaggccaatttccagagga

SEQ ID NO: 365 - RNA, 19 nt, synthetic construct
  source 1..19: mol_type = other RNA
attatagtgagttattttg

SEQ ID NO: 366 - RNA, 19 nt, synthetic construct
  source 1..19: mol_type = other RNA
tgaaggccaatttccagag

SEQ ID NO: 367 - RNA, 19 nt, synthetic construct
  source 1..19: mol_type = other RNA
tattataaaaatatcttgc

SEQ ID NO: 368 - RNA, 19 nt, synthetic construct
  source 1..19: mol_type = other RNA
tgtacttgacaaaaacatt

SEQ ID NO: 369 - RNA, 19 nt, synthetic construct
  source 1..19: mol_type = other RNA
aaaggtacttgttgtttaa

SEQ ID NO: 370 - RNA, 19 nt, synthetic construct
  source 1..19: mol_type = other RNA
tccttcacagactttctga

SEQ ID NO: 371 - RNA, 19 nt, synthetic construct
  source 1..19: mol_type = other RNA
ttgcatcaaatgcttcagt

SEQ ID NO: 372 - RNA, 19 nt, synthetic construct
  source 1..19: mol_type = other RNA
gacattttaacacagaact

SEQ ID NO: 373 - RNA, 19 nt, synthetic construct
  source 1..19: mol_type = other RNA
aaatcaagtaattatagtg

SEQ ID NO: 374 - RNA, 19 nt, synthetic construct
  source 1..19: mol_type = other RNA
aagtaattatagtgagtta

SEQ ID NO: 375 - RNA, 19 nt, synthetic construct
  source 1..19: mol_type = other RNA
ttatagtgagttattttgt

SEQ ID NO: 376 - RNA, 19 nt, synthetic construct
  source 1..19: mol_type = other RNA
aaggccaatttccagagga

SEQ ID NO: 377 - RNA, 19 nt, synthetic construct
  source 1..19: mol_type = other RNA
attatagtgagttattttg

SEQ ID NO: 378 - RNA, 19 nt, synthetic construct
  source 1..19: mol_type = other RNA
tgaaggccaatttccagag

SEQ ID NO: 379 - RNA, 19 nt, synthetic construct
  source 1..19: mol_type = other RNA
tattataaaaatatcttgc

SEQ ID NO: 380 - RNA, 19 nt, synthetic construct
  source 1..19: mol_type = other RNA
tgtacttgacaaaaacatt

SEQ ID NO: 381 - RNA, 19 nt, synthetic construct
  source 1..19: mol_type = other RNA
aaaggtacttgttgtttaa

SEQ ID NO: 382 - RNA, 19 nt, synthetic construct
  source 1..19: mol_type = other RNA
tccttcacagactttctga

SEQ ID NO: 383 - RNA, 19 nt, synthetic construct
  source 1..19: mol_type = other RNA
ttgcatcaaatgcttcagt

SEQ ID NO: 384 - RNA, 19 nt, synthetic construct
  source 1..19: mol_type = other RNA
gacattttaacacagaact

SEQ ID NO: 385 - DNA, 21 bp, synthetic construct
  source 1..21: mol_type = other DNA
  modified_base 1: mod_base = OTHER; note = 2'-O-methylcytidine-3'-phosphate
  modified_base 2: mod_base = OTHER; note = adenosine-3'-phosphate
  modified_base 3: mod_base = OTHER; note = 2'-O-methylcytidine-3'-phosphate
  modified_base 4: mod_base = OTHER; note = 2'-O-methyluridine-3'-phosphate
  modified_base 5: mod_base = OTHER; note = adenosine-3'-phosphate
  modified_base 6: mod_base = OTHER; note = 2'-O-methyluridine-3'-phosphate
  modified_base 7: mod_base = OTHER; note = adenosine-3'-phosphate
  modified_base 8: mod_base = OTHER; note = adenosine-3'-phosphate
  modified_base 9: mod_base = OTHER; note = 2'-O-methyluridine-3'-phosphate
  modified_base 10: mod_base = OTHER; note = 2'-O-methyluridine-3'-phosphate
  modified_base 11: mod_base = OTHER; note = adenosine-3'-phosphate
  modified_base 12: mod_base = OTHER; note = 2'-O-methylcytidine-3'-phosphate
  modified_base 13: mod_base = OTHER; note = 2'-O-methyluridine-3'-phosphate
  modified_base 14: mod_base = OTHER; note = 2'-O-methyluridine-3'-phosphate
  modified_base 15: mod_base = OTHER; note = guanosine-3'-phosphate
  modified_base 16: mod_base = OTHER; note = adenosine-3'-phosphate
  modified_base 17: mod_base = OTHER; note = 2'-O-methyluridine-3'-phosphate
  modified_base 18: mod_base = OTHER; note = 2'-O-methyluridine-3'-phosphate
  modified_base 19: mod_base = OTHER; note = 2'-O-methyluridine-3'-phosphate
  modified_base 20: mod_base = OTHER; note = 2'-deoxythymidine-3'-phosphorothioate
  misc_feature 1..19: note = RNA
  misc_feature 20..21: note = DNA
cactataattacttgattttt

SEQ ID NO: 386 - DNA, 21 bp, synthetic construct
  source 1..21: mol_type = other DNA
  modified_base 1: mod_base = OTHER; note = 2'-O-methyluridine-3'-phosphate
  modified_base 2: mod_base = OTHER; note = adenosine-3'-phosphate
  modified_base 3: mod_base = OTHER; note = adenosine-3'-phosphate
  modified_base 4: mod_base = OTHER; note = 2'-O-methylcytidine-3'-phosphate
  modified_base 5: mod_base = OTHER; note = 2'-O-methyluridine-3'-phosphate
  modified_base 6: mod_base = OTHER; note = 2'-O-methylcytidine-3'-phosphate
  modified_base 7: mod_base = OTHER; note = adenosine-3'-phosphate
  modified_base 8: mod_base = OTHER; note = 2'-O-methylcytidine-3'-phosphate
  modified_base 9: mod_base = OTHER; note = 2'-O-methyluridine-3'-phosphate
  modified_base 10: mod_base = OTHER; note = adenosine-3'-phosphate
  modified_base 11: mod_base = OTHER; note = 2'-O-methyluridine-3'-phosphate
  modified_base 12: mod_base = OTHER; note = adenosine-3'-phosphate
  modified_base 13: mod_base = OTHER; note = adenosine-3'-phosphate
  modified_base 14: mod_base = OTHER; note = 2'-O-methyluridine-3'-phosphate
  modified_base 15: mod_base = OTHER; note = 2'-O-methyluridine-3'-phosphate
  modified_base 16: mod_base = OTHER; note = adenosine-3'-phosphate
  modified_base 17: mod_base = OTHER; note = 2'-O-methylcytidine-3'-phosphate
  modified_base 18: mod_base = OTHER; note = 2'-O-methyluridine-3'-phosphate
  modified_base 19: mod_base = OTHER; note = 2'-O-methyluridine-3'-phosphate
  modified_base 20: mod_base = OTHER; note = 2'-deoxythymidine-3'-phosphorothioate
  misc_feature 1..19: note = RNA
  misc_feature 20..21: note = DNA
taactcactataattactttt

SEQ ID NO: 387 - DNA, 21 bp, synthetic construct
  source 1..21: mol_type = other DNA
  modified_base 1: mod_base = OTHER; note = adenosine-3'-phosphate
  modified_base 2: mod_base = OTHER; note = 2'-O-methylcytidine-3'-phosphate
  modified_base 3: mod_base = OTHER; note = adenosine-3'-phosphate
  modified_base 4: mod_base = OTHER; note = adenosine-3'-phosphate
  modified_base 5: mod_base = OTHER; note = adenosine-3'-phosphate
  modified_base 6: mod_base = OTHER; note = adenosine-3'-phosphate
  modified_base 7: mod_base = OTHER; note = 2'-O-methyluridine-3'-phosphate
  modified_base 8: mod_base = OTHER; note = adenosine-3'-phosphate
  modified_base 9: mod_base = OTHER; note = adenosine-3'-phosphate
  modified_base 10: mod_base = OTHER; note = 2'-O-methylcytidine-3'-phosphate
  modified_base 11: mod_base = OTHER; note = 2'-O-methyluridine-3'-phosphate
  modified_base 12: mod_base = OTHER; note = 2'-O-methylcytidine-3'-phosphate
  modified_base 13: mod_base = OTHER; note = adenosine-3'-phosphate
  modified_base 14: mod_base = OTHER; note = 2'-O-methylcytidine-3'-phosphate
  modified_base 15: mod_base = OTHER; note = 2'-O-methyluridine-3'-phosphate
  modified_base 16: mod_base = OTHER; note = adenosine-3'-phosphate
  modified_base 17: mod_base = OTHER; note = 2'-O-methyluridine-3'-phosphate
  modified_base 18: mod_base = OTHER; note = adenosine-3'-phosphate
  modified_base 19: mod_base = OTHER; note = adenosine-3'-phosphate
  modified_base 20: mod_base = OTHER; note = 2'-deoxythymidine-3'-phosphorothioate
  misc_feature 1..19: note = RNA
  misc_feature 20..21: note = DNA
acaaaataactcactataatt

SEQ ID NO: 388 - DNA, 21 bp, synthetic construct
  source 1..21: mol_type = other DNA
  modified_base 1: mod_base = OTHER; note = 2'-O-methyluridine-3'-phosphate
  modified_base 2: mod_base = OTHER; note = 2'-O-methylcytidine-3'-phosphate
  modified_base 3: mod_base = OTHER; note = 2'-O-methylcytidine-3'-phosphate
  modified_base 4: mod_base = OTHER; note = 2'-O-methyluridine-3'-phosphate
  modified_base 5: mod_base = OTHER; note = 2'-O-methylcytidine-3'-phosphate
  modified_base 6: mod_base = OTHER; note = 2'-O-methyluridine-3'-phosphate
  modified_base 7: mod_base = OTHER; note = guanosine-3'-phosphate
  modified_base 8: mod_base = OTHER; note = guanosine-3'-phosphate
  modified_base 9: mod_base = OTHER; note = adenosine-3'-phosphate
  modified_base 10: mod_base = OTHER; note = adenosine-3'-phosphate
  modified_base 11: mod_base = OTHER; note = adenosine-3'-phosphate
  modified_base 12: mod_base = OTHER; note = 2'-O-methyluridine-3'-phosphate
  modified_base 13: mod_base = OTHER; note = 2'-O-methyluridine-3'-phosphate
  modified_base 14: mod_base = OTHER; note = guanosine-3'-phosphate
  modified_base 15: mod_base = OTHER; note = guanosine-3'-phosphate
  modified_base 16: mod_base = OTHER; note = 2'-O-methylcytidine-3'-phosphate
  modified_base 17: mod_base = OTHER; note = 2'-O-methylcytidine-3'-phosphate
  modified_base 18: mod_base = OTHER; note = 2'-O-methyluridine-3'-phosphate
  modified_base 19: mod_base = OTHER; note = 2'-O-methyluridine-3'-phosphate
  modified_base 20: mod_base = OTHER; note = 2'-deoxythymidine-3'-phosphorothioate
  misc_feature 1..19: note = RNA
  misc_feature 20..21: note = DNA
tcctctggaaattggcctttt

SEQ ID NO: 389 - DNA, 21 bp, synthetic construct
  source 1..21: mol_type = other DNA
  modified_base 1: mod_base = OTHER; note = 2'-O-methylcytidine-3'-phosphate
  modified_base 2: mod_base = OTHER; note = adenosine-3'-phosphate
  modified_base 3: mod_base = OTHER; note = adenosine-3'-phosphate
  modified_base 4: mod_base = OTHER; note = adenosine-3'-phosphate
  modified_base 5: mod_base = OTHER; note = adenosine-3'-phosphate
  modified_base 6: mod_base = OTHER; note = 2'-O-methyluridine-3'-phosphate
  modified_base 7: mod_base = OTHER; note = adenosine-3'-phosphate
  modified_base 8: mod_base = OTHER; note = adenosine-3'-phosphate
  modified_base 9: mod_base = OTHER; note = 2'-O-methylcytidine-3'-phosphate
  modified_base 10: mod_base = OTHER; note = 2'-O-methyluridine-3'-phosphate
  modified_base 11: mod_base = OTHER; note = 2'-O-methylcytidine-3'-phosphate
  modified_base 12: mod_base = OTHER; note = adenosine-3'-phosphate
  modified_base 13: mod_base = OTHER; note = 2'-O-methylcytidine-3'-phosphate
  modified_base 14: mod_base = OTHER; note = 2'-O-methyluridine-3'-phosphate
  modified_base 15: mod_base = OTHER; note = adenosine-3'-phosphate
  modified_base 16: mod_base = OTHER; note = 2'-O-methyluridine-3'-phosphate
  modified_base 17: mod_base = OTHER; note = adenosine-3'-phosphate
  modified_base 18: mod_base = OTHER; note = adenosine-3'-phosphate
  modified_base 19: mod_base = OTHER; note = 2'-O-methyluridine-3'-phosphate
  modified_base 20: mod_base = OTHER; note = 2'-deoxythymidine-3'-phosphorothioate
  misc_feature 1..19: note = RNA
  misc_feature 20..21: note = DNA
caaaataactcactataattt

SEQ ID NO: 390 - DNA, 21 bp, synthetic construct
  source 1..21: mol_type = other DNA
  modified_base 1: mod_base = OTHER; note = 2'-O-methylcytidine-3'-phosphate
  modified_base 2: mod_base = OTHER; note = 2'-O-methyluridine-3'-phosphate
  modified_base 3: mod_base = OTHER; note = 2'-O-methylcytidine-3'-phosphate
  modified_base 4: mod_base = OTHER; note = 2'-O-methyluridine-3'-phosphate
  modified_base 5: mod_base = OTHER; note = guanosine-3'-phosphate
  modified_base 6: mod_base = OTHER; note = guanosine-3'-phosphate
  modified_base 7: mod_base = OTHER; note = adenosine-3'-phosphate
  modified_base 8: mod_base = OTHER; note = adenosine-3'-phosphate
  modified_base 9: mod_base = OTHER; note = adenosine-3'-phosphate
  modified_base 10: mod_base = OTHER; note = 2'-O-methyluridine-3'-phosphate
  modified_base 11: mod_base = OTHER; note = 2'-O-methyluridine-3'-phosphate
  modified_base 12: mod_base = OTHER; note = guanosine-3'-phosphate
  modified_base 13: mod_base = OTHER; note = guanosine-3'-phosphate
  modified_base 14: mod_base = OTHER; note = 2'-O-methylcytidine-3'-phosphate
  modified_base 15: mod_base = OTHER; note = 2'-O-methylcytidine-3'-phosphate
  modified_base 16: mod_base = OTHER; note = 2'-O-methyluridine-3'-phosphate
  modified_base 17: mod_base = OTHER; note = 2'-O-methyluridine-3'-phosphate
  modified_base 18: mod_base = OTHER; note = 2'-O-methylcytidine-3'-phosphate
  modified_base 19: mod_base = OTHER; note = adenosine-3'-phosphate
  modified_base 20: mod_base = OTHER; note = 2'-deoxythymidine-3'-phosphorothioate
  misc_feature 1..19: note = RNA
  misc_feature 20..21: note = DNA
ctctggaaattggccttcatt

SEQ ID NO: 391 - DNA, 21 bp, synthetic construct
  source 1..21: mol_type = other DNA
  modified_base 1: mod_base = OTHER; note = guanosine-3'-phosphate
  modified_base 2: mod_base = OTHER; note = 2'-O-methylcytidine-3'-phosphate
  modified_base 3: mod_base = OTHER; note = adenosine-3'-phosphate
  modified_base 4: mod_base = OTHER; note = adenosine-3'-phosphate
  modified_base 5: mod_base = OTHER; note = guanosine-3'-phosphate
  modified_base 6: mod_base = OTHER; note = adenosine-3'-phosphate
  modified_base 7: mod_base = OTHER; note = 2'-O-methyluridine-3'-phosphate
  modified_base 8: mod_base = OTHER; note = adenosine-3'-phosphate
  modified_base 9: mod_base = OTHER; note = 2'-O-methyluridine-3'-phosphate
  modified_base 10: mod_base = OTHER; note = 2'-O-methyluridine-3'-phosphate
  modified_base 11: mod_base = OTHER; note = 2'-O-methyluridine-3'-phosphate
  modified_base 12: mod_base = OTHER; note = 2'-O-methyluridine-3'-phosphate
  modified_base 13: mod_base = OTHER; note = 2'-O-methyluridine-3'-phosphate
  modified_base 14: mod_base = OTHER; note = adenosine-3'-phosphate
  modified_base 15: mod_base = OTHER; note = 2'-O-methyluridine-3'-phosphate
  modified_base 16: mod_base = OTHER; note = adenosine-3'-phosphate
  modified_base 17: mod_base = OTHER; note = adenosine-3'-phosphate
  modified_base 18: mod_base = OTHER; note = 2'-O-methyluridine-3'-phosphate
  modified_base 19: mod_base = OTHER; note = adenosine-3'-phosphate
  modified_base 20: mod_base = OTHER; note = 2'-deoxythymidine-3'-phosphorothioate
  misc_feature 1..19: note = RNA
  misc_feature 20..21: note = DNA
gcaagatatttttataatatt

SEQ ID NO: 392 - DNA, 21 bp, synthetic construct
  source 1..21: mol_type = other DNA
  modified_base 1: mod_base = OTHER; note = adenosine-3'-phosphate
  modified_base 2: mod_base = OTHER; note = adenosine-3'-phosphate
  modified_base 3: mod_base = OTHER; note = 2'-O-methyluridine-3'-phosphate
  modified_base 4: mod_base = OTHER; note = guanosine-3'-phosphate
  modified_base 5: mod_base = OTHER; note = 2'-O-methyluridine-3'-phosphate
  modified_base 6: mod_base = OTHER; note = 2'-O-methyluridine-3'-phosphate
  modified_base 7: mod_base = OTHER; note = 2'-O-methyluridine-3'-phosphate
  modified_base 8: mod_base = OTHER; note = 2'-O-methyluridine-3'-phosphate
  modified_base 9: mod_base = OTHER; note = 2'-O-methyluridine-3'-phosphate
  modified_base 10: mod_base = OTHER; note = guanosine-3'-phosphate
  modified_base 11: mod_base = OTHER; note = 2'-O-methyluridine-3'-phosphate
  modified_base 12: mod_base = OTHER; note = 2'-O-methylcytidine-3'-phosphate
  modified_base 13: mod_base = OTHER; note = adenosine-3'-phosphate
  modified_base 14: mod_base = OTHER; note = adenosine-3'-phosphate
  modified_base 15: mod_base = OTHER; note = guanosine-3'-phosphate
  modified_base 16: mod_base = OTHER; note = 2'-O-methyluridine-3'-phosphate
  modified_base 17: mod_base = OTHER; note = adenosine-3'-phosphate
  modified_base 18: mod_base = OTHER; note = 2'-O-methylcytidine-3'-phosphate
  modified_base 19: mod_base = OTHER; note = adenosine-3'-phosphate
  modified_base 20: mod_base = OTHER; note = 2'-deoxythymidine-3'-phosphorothioate
  misc_feature 1..19: note = RNA
  misc_feature 20..21: note = DNA
aatgtttttgtcaagtacatt

SEQ ID NO: 393 - DNA, 21 bp, synthetic construct
  source 1..21: mol_type = other DNA
  modified_base 1: mod_base = OTHER; note = 2'-O-methyluridine-3'-phosphate
  modified_base 2: mod_base = OTHER; note = 2'-O-methyluridine-3'-phosphate
  modified_base 3: mod_base = OTHER; note = adenosine-3'-phosphate
  modified_base 4: mod_base = OTHER; note = adenosine-3'-phosphate
  modified_base 5: mod_base = OTHER; note = adenosine-3'-phosphate
  modified_base 6: mod_base = OTHER; note = 2'-O-methylcytidine-3'-phosphate
  modified_base 7: mod_base = OTHER; note = adenosine-3'-phosphate
  modified_base 8: mod_base = OTHER; note = adenosine-3'-phosphate
  modified_base 9: mod_base = OTHER; note = 2'-O-methylcytidine-3'-phosphate
  modified_base 10: mod_base = OTHER; note = adenosine-3'-phosphate
  modified_base 11: mod_base = OTHER; note = adenosine-3'-phosphate
  modified_base 12: mod_base = OTHER; note = guanosine-3'-phosphate
  modified_base 13: mod_base = OTHER; note = 2'-O-methyluridine-3'-phosphate
  modified_base 14: mod_base = OTHER; note = adenosine-3'-phosphate
  modified_base 15: mod_base = OTHER; note = 2'-O-methylcytidine-3'-phosphate
  modified_base 16: mod_base = OTHER; note = 2'-O-methylcytidine-3'-phosphate
  modified_base 17: mod_base = OTHER; note = 2'-O-methyluridine-3'-phosphate
  modified_base 18: mod_base = OTHER; note = 2'-O-methyluridine-3'-phosphate
  modified_base 19: mod_base = OTHER; note = 2'-O-methyluridine-3'-phosphate
  modified_base 20: mod_base = OTHER; note = 2'-deoxythymidine-3'-phosphorothioate
  misc_feature 1..19: note = RNA
  misc_feature 20..21: note = DNA
ttaaacaacaagtaccttttt

SEQ ID NO: 394 - DNA, 21 bp, synthetic construct
  source 1..21: mol_type = other DNA
  modified_base 1: mod_base = OTHER; note = 2'-O-methyluridine-3'-phosphate
  modified_base 2: mod_base = OTHER; note = 2'-O-methylcytidine-3'-phosphate
  modified_base 3: mod_base = OTHER; note = adenosine-3'-phosphate
  modified_base 4: mod_base = OTHER; note = guanosine-3'-phosphate
  modified_base 5: mod_base = OTHER; note = adenosine-3'-phosphate
  modified_base 6: mod_base = OTHER; note = adenosine-3'-phosphate
  modified_base 7: mod_base = OTHER; note = adenosine-3'-phosphate
  modified_base 8: mod_base = OTHER; note = guanosine-3'-phosphate
  modified_base 9: mod_base = OTHER; note = 2'-O-methyluridine-3'-phosphate
  modified_base 10: mod_base = OTHER; note = 2'-O-methylcytidine-3'-phosphate
  modified_base 11: mod_base = OTHER; note = 2'-O-methyluridine-3'-phosphate
  modified_base 12: mod_base = OTHER; note = guanosine-3'-phosphate
  modified_base 13: mod_base = OTHER; note = 2'-O-methyluridine-3'-phosphate
  modified_base 14: mod_base = OTHER; note = guanosine-3'-phosphate
  modified_base 15: mod_base = OTHER; note = adenosine-3'-phosphate
  modified_base 16: mod_base = OTHER; note = adenosine-3'-phosphate
  modified_base 17: mod_base = OTHER; note = guanosine-3'-phosphate
  modified_base 18: mod_base = OTHER; note = guanosine-3'-phosphate
  modified_base 19: mod_base = OTHER; note = adenosine-3'-phosphate
  modified_base 20: mod_base = OTHER; note = 2'-deoxythymidine-3'-phosphorothioate
  misc_feature 1..19: note = RNA
  misc_feature 20..21: note = DNA
tcagaaagtctgtgaaggatt

SEQ ID NO: 395 - DNA, 21 bp, synthetic construct
  source 1..21: mol_type = other DNA
  modified_base 1: mod_base = OTHER; note = adenosine-3'-phosphate
  modified_base 2: mod_base = OTHER; note = 2'-O-methylcytidine-3'-phosphate
  modified_base 3: mod_base = OTHER; note = 2'-O-methyluridine-3'-phosphate
  modified_base 4: mod_base = OTHER; note = guanosine-3'-phosphate
  modified_base 5: mod_base = OTHER; note = adenosine-3'-phosphate
  modified_base 6: mod_base = OTHER; note = adenosine-3'-phosphate
  modified_base 7: mod_base = OTHER; note = guanosine-3'-phosphate
  modified_base 8: mod_base = OTHER; note = 2'-O-methylcytidine-3'-phosphate
  modified_base 9: mod_base = OTHER; note = adenosine-3'-phosphate
  modified_base 10: mod_base = OTHER; note = 2'-O-methyluridine-3'-phosphate
  modified_base 11: mod_base = OTHER; note = 2'-O-methyluridine-3'-phosphate
  modified_base 12: mod_base = OTHER; note = 2'-O-methyluridine-3'-phosphate
  modified_base 13: mod_base = OTHER; note = guanosine-3'-phosphate
  modified_base 14: mod_base = OTHER; note = adenosine-3'-phosphate
  modified_base 15: mod_base = OTHER; note = 2'-O-methyluridine-3'-phosphate
  modified_base 16: mod_base = OTHER; note = guanosine-3'-phosphate
  modified_base 17: mod_base = OTHER; note = 2'-O-methylcytidine-3'-phosphate
  modified_base 18: mod_base = OTHER; note = adenosine-3'-phosphate
  modified_base 19: mod_base = OTHER; note = adenosine-3'-phosphate
  modified_base 20: mod_base = OTHER; note = 2'-deoxythymidine-3'-phosphorothioate
  misc_feature 1..19: note = RNA
  misc_feature 20..21: note = DNA
actgaagcatttgatgcaatt

SEQ ID NO: 396 - DNA, 21 bp, synthetic construct
  source 1..21: mol_type = other DNA
  modified_base 1: mod_base = OTHER; note = adenosine-3'-phosphate
  modified_base 2: mod_base = OTHER; note = guanosine-3'-phosphate
  modified_base 3: mod_base = OTHER; note = 2'-O-methyluridine-3'-phosphate
  modified_base 4: mod_base = OTHER; note = 2'-O-methyluridine-3'-phosphate
  modified_base 5: mod_base = OTHER; note = 2'-O-methylcytidine-3'-phosphate
  modified_base 6: mod_base = OTHER; note = 2'-O-methyluridine-3'-phosphate
  modified_base 7: mod_base = OTHER; note = guanosine-3'-phosphate
  modified_base 8: mod_base = OTHER; note = 2'-O-methyluridine-3'-phosphate
  modified_base 9: mod_base = OTHER; note = guanosine-3'-phosphate
  modified_base 10: mod_base = OTHER; note = 2'-O-methyluridine-3'-phosphate
  modified_base 11: mod_base = OTHER; note = 2'-O-methyluridine-3'-phosphate
  modified_base 12: mod_base = OTHER; note = adenosine-3'-phosphate
  modified_base 13: mod_base = OTHER; note = adenosine-3'-phosphate
  modified_base 14: mod_base = OTHER; note = adenosine-3'-phosphate
  modified_base 15: mod_base = OTHER; note = adenosine-3'-phosphate
  modified_base 16: mod_base = OTHER; note = 2'-O-methyluridine-3'-phosphate
  modified_base 17: mod_base = OTHER; note = guanosine-3'-phosphate
  modified_base 18: mod_base = OTHER; note = 2'-O-methyluridine-3'-phosphate
  modified_base 19: mod_base = OTHER; note = 2'-O-methylcytidine-3'-phosphate
  modified_base 20: mod_base = OTHER; note = 2'-deoxythymidine-3'-phosphorothioate
  misc_feature 1..19: note = RNA
  misc_feature 20..21: note = DNA
agttctgtgttaaaatgtctt

SEQ ID NO: 397 - DNA, 21 bp, synthetic construct
  source 1..21: mol_type = other DNA
  modified_base 1: mod_base = OTHER; note = guanosine-3'-phosphate
  modified_base 2: mod_base = OTHER; note = adenosine-3'-phosphate
  modified_base 3: mod_base = OTHER; note = 2'-O-methyluridine-3'-phosphate
  modified_base 4: mod_base = OTHER; note = 2'-O-methyluridine-3'-phosphate
  modified_base 5: mod_base = OTHER; note = 2'-O-methyluridine-3'-phosphate
  modified_base 6: mod_base = OTHER; note = 2'-O-methyluridine-3'-phosphate
  modified_base 7: mod_base = OTHER; note = guanosine-3'-phosphate
  modified_base 8: mod_base = OTHER; note = adenosine-3'-phosphate
  modified_base 9: mod_base = OTHER; note = guanosine-3'-phosphate
  modified_base 10: mod_base = OTHER; note = 2'-O-methyluridine-3'-phosphate
  modified_base 11: mod_base = OTHER; note = guanosine-3'-phosphate
  modified_base 12: mod_base = OTHER; note = 2'-O-methyluridine-3'-phosphate
  modified_base 13: mod_base = OTHER; note = adenosine-3'-phosphate
  modified_base 14: mod_base = OTHER; note = adenosine-3'-phosphate
  modified_base 15: mod_base = OTHER; note = adenosine-3'-phosphate
  modified_base 16: mod_base = OTHER; note = adenosine-3'-phosphate
  modified_base 17: mod_base = OTHER; note = guanosine-3'-phosphate
  modified_base 18: mod_base = OTHER; note = guanosine-3'-phosphate
  modified_base 19: mod_base = OTHER; note = adenosine-3'-phosphate
  modified_base 20: mod_base = OTHER; note = 2'-deoxythymidine-3'-phosphorothioate
  misc_feature 1..19: note = RNA
  misc_feature 20..21: note = DNA
gattttgagtgtaaaaggatt

SEQ ID NO: 398 - DNA, 21 bp, synthetic construct
  source 1..21: mol_type = other DNA
  modified_base 1: mod_base = OTHER; note = 2'-O-methyluridine-3'-phosphate
  modified_base 2: mod_base = OTHER; note = guanosine-3'-phosphate
  modified_base 3: mod_base = OTHER; note = adenosine-3'-phosphate
  modified_base 4: mod_base = OTHER; note = 2'-O-methyluridine-3'-phosphate
  modified_base 5: mod_base = OTHER; note = guanosine-3'-phosphate
  modified_base 6: mod_base = OTHER; note = adenosine-3'-phosphate
  modified_base 7: mod_base = OTHER; note = adenosine-3'-phosphate
  modified_base 8: mod_base = OTHER; note = 2'-O-methylcytidine-3'-phosphate
  modified_base 9: mod_base = OTHER; note = 2'-O-methylcytidine-3'-phosphate
  modified_base 10: mod_base = OTHER; note = 2'-O-methyluridine-3'-phosphate
  modified_base 11: mod_base = OTHER; note = 2'-O-methyluridine-3'-phosphate
  modified_base 12: mod_base = OTHER; note = guanosine-3'-phosphate
  modified_base 13: mod_base = OTHER; note = 2'-O-methyluridine-3'-phosphate
  modified_base 14: mod_base = OTHER; note = adenosine-3'-phosphate
  modified_base 15: mod_base = OTHER; note = adenosine-3'-phosphate
  modified_base 16: mod_base = OTHER; note = adenosine-3'-phosphate
  modified_base 17: mod_base = OTHER; note = guanosine-3'-phosphate
  modified_base 18: mod_base = OTHER; note = adenosine-3'-phosphate
  modified_base 19: mod_base = OTHER; note = adenosine-3'-phosphate
  modified_base 20: mod_base = OTHER; note = 2'-deoxythymidine-3'-phosphorothioate
  misc_feature 1..19: note = RNA
  misc_feature 20..21: note = DNA
tgatgaaccttgtaaagaatt

SEQ ID NO: 399 - DNA, 21 bp, synthetic construct
  source 1..21: mol_type = other DNA
  modified_base 1: mod_base = OTHER; note = 2'-O-methylcytidine-3'-phosphate
  modified_base 2: mod_base = OTHER; note = adenosine-3'-phosphate
  modified_base 3: mod_base = OTHER; note = 2'-O-methyluridine-3'-phosphate
  modified_base 4: mod_base = OTHER; note = 2'-O-methyluridine-3'-phosphate
  modified_base 5: mod_base = OTHER; note = guanosine-3'-phosphate
  modified_base 6: mod_base = OTHER; note = guanosine-3'-phosphate
  modified_base 7: mod_base = OTHER; note = adenosine-3'-phosphate
  modified_base 8: mod_base = OTHER; note = adenosine-3'-phosphate
  modified_base 9: mod_base = OTHER; note = 2'-O-methylcytidine-3'-phosphate
  modified_base 10: mod_base = OTHER; note = adenosine-3'-phosphate
  modified_base 11: mod_base = OTHER; note = 2'-O-methyluridine-3'-phosphate
  modified_base 12: mod_base = OTHER; note = 2'-O-methyluridine-3'-phosphate
  modified_base 13: mod_base = OTHER; note = 2'-O-methyluridine-3'-phosphate
  modified_base 14: mod_base = OTHER; note = 2'-O-methyluridine-3'-phosphate
  modified_base 15: mod_base = OTHER; note = 2'-O-methyluridine-3'-phosphate
  modified_base 16: mod_base = OTHER; note = 2'-O-methylcytidine-3'-phosphate
  modified_base 17: mod_base = OTHER; note = adenosine-3'-phosphate
  modified_base 18: mod_base = OTHER; note = 2'-O-methyluridine-3'-phosphate
  modified_base 19: mod_base = OTHER; note = 2'-O-methyluridine-3'-phosphate
  modified_base 20: mod_base = OTHER; note = 2'-deoxythymidine-3'-phosphorothioate
  misc_feature 1..19: note = RNA
  misc_feature 20..21: note = DNA
cattggaacatttttcatttt

SEQ ID NO: 400 - DNA, 21 bp, synthetic construct
  source 1..21: mol_type = other DNA
  modified_base 1: mod_base = OTHER; note = 2'-O-methylcytidine-3'-phosphate
  modified_base 2: mod_base = OTHER; note = 2'-O-methylcytidine-3'-phosphate
  modified_base 3: mod_base = OTHER; note = adenosine-3'-phosphate
  modified_base 4: mod_base = OTHER; note = guanosine-3'-phosphate
  modified_base 5: mod_base = OTHER; note = adenosine-3'-phosphate
  modified_base 6: mod_base = OTHER; note = adenosine-3'-phosphate
  modified_base 7: mod_base = OTHER; note = adenosine-3'-phosphate
  modified_base 8: mod_base = OTHER; note = 2'-O-methyluridine-3'-phosphate
  modified_base 9: mod_base = OTHER; note = 2'-O-methyluridine-3'-phosphate
  modified_base 10: mod_base = OTHER; note = 2'-O-methylcytidine-3'-phosphate
  modified_base 11: mod_base = OTHER; note = guanosine-3'-phosphate
  modified_base 12: mod_base = OTHER; note = guanosine-3'-phosphate
  modified_base 13: mod_base = OTHER; note = adenosine-3'-phosphate
  modified_base 14: mod_base = OTHER; note = guanosine-3'-phosphate
  modified_base 15: mod_base = OTHER; note = 2'-O-methyluridine-3'-phosphate
  modified_base 16: mod_base = OTHER; note = 2'-O-methyluridine-3'-phosphate
  modified_base 17: mod_base = OTHER; note = adenosine-3'-phosphate
  modified_base 18: mod_base = OTHER; note = 2'-O-methyluridine-3'-phosphate
  modified_base 19: mod_base = OTHER; note = 2'-O-methyluridine-3'-phosphate
  modified_base 20: mod_base = OTHER; note = 2'-deoxythymidine-3'-phosphorothioate
  misc_feature 1..19: note = RNA
  misc_feature 20..21: note = DNA
ccagaaattcggagttatttt

SEQ ID NO: 401 - DNA, 21 bp, synthetic construct
  source 1..21: mol_type = other DNA
  modified_base 1: mod_base = OTHER; note = 2'-O-methylcytidine-3'-phosphate
  modified_base 2: mod_base = OTHER; note = 2'-O-methylcytidine-3'-phosphate
  modified_base 3: mod_base = OTHER; note = 2'-O-methyluridine-3'-phosphate
  modified_base 4: mod_base = OTHER; note = guanosine-3'-phosphate
  modified_base 5: mod_base = OTHER; note = guanosine-3'-phosphate
  modified_base 6: mod_base = OTHER; note = guanosine-3'-phosphate
  modified_base 7: mod_base = OTHER; note = adenosine-3'-phosphate
  modified_base 8: mod_base = OTHER; note = guanosine-3'-phosphate
  modified_base 9: mod_base = OTHER; note = adenosine-3'-phosphate
  modified_base 10: mod_base = OTHER; note = 2'-O-methyluridine-3'-phosphate
  modified_base 11: mod_base = OTHER; note = adenosine-3'-phosphate
  modified_base 12: mod_base = OTHER; note = adenosine-3'-phosphate
  modified_base 13: mod_base = OTHER; note = adenosine-3'-phosphate
  modified_base 14: mod_base = OTHER; note = adenosine-3'-phosphate
  modified_base 15: mod_base = OTHER; note = 2'-O-methylcytidine-3'-phosphate
  modified_base 16: mod_base = OTHER; note = 2'-O-methyluridine-3'-phosphate
  modified_base 17: mod_base = OTHER; note = 2'-O-methylcytidine-3'-phosphate
  modified_base 18: mod_base = OTHER; note = adenosine-3'-phosphate
  modified_base 19: mod_base = OTHER; note = 2'-O-methylcytidine-3'-phosphate
  modified_base 20: mod_base = OTHER; note = 2'-deoxythymidine-3'-phosphorothioate
  misc_feature 1..19: note = RNA
  misc_feature 20..21: note = DNA
cctgggagataaaactcactt

SEQ ID NO: 402 - DNA, 21 bp, synthetic construct
  source 1..21: mol_type = other DNA
  modified_base 1: mod_base = OTHER; note = adenosine-3'-phosphate
  modified_base 2: mod_base = OTHER; note = adenosine-3'-phosphate
  modified_base 3: mod_base = OTHER; note = adenosine-3'-phosphate
  modified_base 4: mod_base = OTHER; note = 2'-O-methyluridine-3'-phosphate
  modified_base 5: mod_base = OTHER; note = guanosine-3'-phosphate
  modified_base 6: mod_base = OTHER; note = adenosine-3'-phosphate
  modified_base 7: mod_base = OTHER; note = 2'-O-methyluridine-3'-phosphate
  modified_base 8: mod_base = OTHER; note = guanosine-3'-phosphate
  modified_base 9: mod_base = OTHER; note = adenosine-3'-phosphate
  modified_base 10: mod_base = OTHER; note = adenosine-3'-phosphate
  modified_base 11: mod_base = OTHER; note = 2'-O-methylcytidine-3'-phosphate
  modified_base 12: mod_base = OTHER; note = 2'-O-methylcytidine-3'-phosphate
  modified_base 13: mod_base = OTHER; note = 2'-O-methyluridine-3'-phosphate
  modified_base 14: mod_base = OTHER; note = 2'-O-methyluridine-3'-phosphate
  modified_base 15: mod_base = OTHER; note = guanosine-3'-phosphate
  modified_base 16: mod_base = OTHER; note = 2'-O-methyluridine-3'-phosphate
  modified_base 17: mod_base = OTHER; note = adenosine-3'-phosphate
  modified_base 18: mod_base = OTHER; note = adenosine-3'-phosphate
  modified_base 19: mod_base = OTHER; note = adenosine-3'-phosphate
  modified_base 20: mod_base = OTHER; note = 2'-deoxythymidine-3'-phosphorothioate
  misc_feature 1..19: note = RNA
  misc_feature 20..21: note = DNA
aaatgatgaaccttgtaaatt

SEQ ID NO: 403 - DNA, 21 bp, synthetic construct
  source 1..21: mol_type = other DNA
  modified_base 1: mod_base = OTHER; note = 2'-O-methyluridine-3'-phosphate
  modified_base 2: mod_base = OTHER; note = guanosine-3'-phosphate
  modified_base 3: mod_base = OTHER; note = 2'-O-methylcytidine-3'-phosphate
  modified_base 4: mod_base = OTHER; note = 2'-O-methyluridine-3'-phosphate
  modified_base 5: mod_base = OTHER; note = 2'-O-methylcytidine-3'-phosphate
  modified_base 6: mod_base = OTHER; note = adenosine-3'-phosphate
  modified_base 7: mod_base = OTHER; note = adenosine-3'-phosphate
  modified_base 8: mod_base = OTHER; note = guanosine-3'-phosphate
  modified_base 9: mod_base = OTHER; note = 2'-O-methyluridine-3'-phosphate
  modified_base 10: mod_base = OTHER; note = 2'-O-methylcytidine-3'-phosphate
  modified_base 11: mod_base = OTHER; note = adenosine-3'-phosphate
  modified_base 12: mod_base = OTHER; note = 2'-O-methylcytidine-3'-phosphate
  modified_base 13: mod_base = OTHER; note = adenosine-3'-phosphate
  modified_base 14: mod_base = OTHER; note = 2'-O-methyluridine-3'-phosphate
  modified_base 15: mod_base = OTHER; note = 2'-O-methyluridine-3'-phosphate
  modified_base 16: mod_base = OTHER; note = 2'-O-methyluridine-3'-phosphate
  modified_base 17: mod_base = OTHER; note = guanosine-3'-phosphate
  modified_base 18: mod_base = OTHER; note = adenosine-3'-phosphate
  modified_base 19: mod_base = OTHER; note = 2'-O-methyluridine-3'-phosphate
  modified_base 20: mod_base = OTHER; note = 2'-deoxythymidine-3'-phosphorothioate
  misc_feature 1..19: note = RNA
  misc_feature 20..21: note = DNA
tgctcaagtcacatttgattt

SEQ ID NO: 404 - DNA, 21 bp, synthetic construct
  source 1..21: mol_type = other DNA
  modified_base 1: mod_base = OTHER; note = guanosine-3'-phosphate
  modified_base 2: mod_base = OTHER; note = adenosine-3'-phosphate
  modified_base 3: mod_base = OTHER; note = 2'-O-methyluridine-3'-phosphate
  modified_base 4: mod_base = OTHER; note = 2'-O-methyluridine-3'-phosphate
  modified_base 5: mod_base = OTHER; note = guanosine-3'-phosphate
  modified_base 6: mod_base = OTHER; note = 2'-O-methylcytidine-3'-phosphate
  modified_base 7: mod_base = OTHER; note = adenosine-3'-phosphate
  modified_base 8: mod_base = OTHER; note = 2'-O-methyluridine-3'-phosphate
  modified_base 9: mod_base = OTHER; note = adenosine-3'-phosphate
  modified_base 10: mod_base = OTHER; note = 2'-O-methyluridine-3'-phosphate
  modified_base 11: mod_base = OTHER; note = guanosine-3'-phosphate
  modified_base 12: mod_base = OTHER; note = 2'-O-methylcytidine-3'-phosphate
  modified_base 13: mod_base = OTHER; note = 2'-O-methyluridine-3'-phosphate
  modified_base 14: mod_base = OTHER; note = 2'-O-methyluridine-3'-phosphate
  modified_base 15: mod_base = OTHER; note = adenosine-3'-phosphate
  modified_base 16: mod_base = OTHER; note = 2'-O-methyluridine-3'-phosphate
  modified_base 17: mod_base = OTHER; note = adenosine-3'-phosphate
  modified_base 18: mod_base = OTHER; note = adenosine-3'-phosphate
  modified_base 19: mod_base = OTHER; note = adenosine-3'-phosphate
  modified_base 20: mod_base = OTHER; note = 2'-deoxythymidine-3'-phosphorothioate
  misc_feature 1..19: note = RNA
  misc_feature 20..21: note = DNA
gattgcatatgcttataaatt

SEQ ID NO: 405 - DNA, 21 bp, synthetic construct
  source 1..21: mol_type = other DNA
  modified_base 1: mod_base = OTHER; note = 2'-O-methyluridine-3'-phosphate
  modified_base 2: mod_base = OTHER; note = adenosine-3'-phosphate
  modified_base 3: mod_base = OTHER; note = 2'-O-methyluridine-3'-phosphate
  modified_base 4: mod_base = OTHER; note = 2'-O-methylcytidine-3'-phosphate
  modified_base 5: mod_base = OTHER; note = 2'-O-methylcytidine-3'-phosphate
  modified_base 6: mod_base = OTHER; note = 2'-O-methyluridine-3'-phosphate
  modified_base 7: mod_base = OTHER; note = guanosine-3'-phosphate
  modified_base 8: mod_base = OTHER; note = adenosine-3'-phosphate
  modified_base 9: mod_base = OTHER; note = 2'-O-methyluridine-3'-phosphate
  modified_base 10: mod_base = OTHER; note = adenosine-3'-phosphate
  modified_base 11: mod_base = OTHER; note = adenosine-3'-phosphate
  modified_base 12: mod_base = OTHER; note = adenosine-3'-phosphate
  modified_base 13: mod_base = OTHER; note = adenosine-3'-phosphate
  modified_base 14: mod_base = OTHER; note = adenosine-3'-phosphate
  modified_base 15: mod_base = OTHER; note = adenosine-3'-phosphate
  modified_base 16: mod_base = OTHER; note = 2'-O-methyluridine-3'-phosphate
  modified_base 17: mod_base = OTHER; note = 2'-O-methyluridine-3'-phosphate
  modified_base 18: mod_base = OTHER; note = 2'-O-methyluridine-3'-phosphate
  modified_base 19: mod_base = OTHER; note = adenosine-3'-phosphate
  modified_base 20: mod_base = OTHER; note = 2'-deoxythymidine-3'-phosphorothioate
  misc_feature 1..19: note = RNA
  misc_feature 20..21: note = DNA
tatcctgataaaaaatttatt

SEQ ID NO: 406 - DNA, 21 bp, synthetic construct
  source 1..21: mol_type = other DNA
  modified_base 1: mod_base = OTHER; note = guanosine-3'-phosphate
  modified_base 2: mod_base = OTHER; note = adenosine-3'-phosphate
  modified_base 3: mod_base = OTHER; note = adenosine-3'-phosphate
  modified_base 4: mod_base = OTHER; note = guanosine-3'-phosphate
  modified_base 5: mod_base = OTHER; note = 2'-O-methyluridine-3'-phosphate
  modified_base 6: mod_base = OTHER; note = 2'-O-methyluridine-3'-phosphate
  modified_base 7: mod_base = OTHER; note = 2'-O-methyluridine-3'-phosphate
  modified_base 8: mod_base = OTHER; note = guanosine-3'-phosphate
  modified_base 9: mod_base = OTHER; note = 2'-O-methylcytidine-3'-phosphate
  modified_base 10: mod_base = OTHER; note = adenosine-3'-phosphate
  modified_base 11: mod_base = OTHER; note = guanosine-3'-phosphate
  modified_base 12: mod_base = OTHER; note = 2'-O-methylcytidine-3'-phosphate
  modified_base 13: mod_base = OTHER; note = 2'-O-methyluridine-3'-phosphate
  modified_base 14: mod_base = OTHER; note = 2'-O-methyluridine-3'-phosphate
  modified_base 15: mod_base = OTHER; note = 2'-O-methyluridine-3'-phosphate
  modified_base 16: mod_base = OTHER; note = 2'-O-methyluridine-3'-phosphate
  modified_base 17: mod_base = OTHER; note = adenosine-3'-phosphate
  modified_base 18: mod_base = OTHER; note = 2'-O-methyluridine-3'-phosphate
  modified_base 19: mod_base = OTHER; note = 2'-O-methyluridine-3'-phosphate
  modified_base 20: mod_base = OTHER; note = 2'-deoxythymidine-3'-phosphorothioate
  misc_feature 1..19: note = RNA
  misc_feature 20..21: note = DNA
gaagtttgcagcttttatttt

SEQ ID NO: 407 - DNA, 21 bp, synthetic construct
  source 1..21: mol_type = other DNA
  modified_base 1: mod_base = OTHER; note = adenosine-3'-phosphate
  modified_base 2: mod_base = OTHER; note = guanosine-3'-phosphate
  modified_base 3: mod_base = OTHER; note = adenosine-3'-phosphate
  modified_base 4: mod_base = OTHER; note = adenosine-3'-phosphate
  modified_base 5: mod_base = OTHER; note = adenosine-3'-phosphate
  modified_base 6: mod_base = OTHER; note = 2'-O-methyluridine-3'-phosphate
  modified_base 7: mod_base = OTHER; note = 2'-O-methyluridine-3'-phosphate
  modified_base 8: mod_base = OTHER; note = guanosine-3'-phosphate
  modified_base 9: mod_base = OTHER; note = adenosine-3'-phosphate
  modified_base 10: mod_base = OTHER; note = 2'-O-methyluridine-3'-phosphate
  modified_base 11: mod_base = OTHER; note = 2'-O-methylcytidine-3'-phosphate
  modified_base 12: mod_base = OTHER; note = adenosine-3'-phosphate
  modified_base 13: mod_base = OTHER; note = 2'-O-methyluridine-3'-phosphate
  modified_base 14: mod_base = OTHER; note = adenosine-3'-phosphate
  modified_base 15: mod_base = OTHER; note = 2'-O-methyluridine-3'-phosphate
  modified_base 16: mod_base = OTHER; note = 2'-O-methyluridine-3'-phosphate
  modified_base 17: mod_base = OTHER; note = guanosine-3'-phosphate
  modified_base 18: mod_base = OTHER; note = guanosine-3'-phosphate
  modified_base 19: mod_base = OTHER; note = adenosine-3'-phosphate
  modified_base 20: mod_base = OTHER; note = 2'-deoxythymidine-3'-phosphorothioate
  misc_feature 1..19: note = RNA
  misc_feature 20..21: note = DNA
agaaattgatcatattggatt

SEQ ID NO: 408 - DNA, 21 bp, synthetic construct
  source 1..21: mol_type = other DNA
  modified_base 1: mod_base = OTHER; note = 2'-O-methylcytidine-3'-phosphate
  modified_base 2: mod_base = OTHER; note = 2'-O-methylcytidine-3'-phosphate
  modified_base 3: mod_base = OTHER; note = 2'-O-methyluridine-3'-phosphate
  modified_base 4: mod_base = OTHER; note = guanosine-3'-phosphate
  modified_base 5: mod_base = OTHER; note = adenosine-3'-phosphate
  modified_base 6: mod_base = OTHER; note = 2'-O-methyluridine-3'-phosphate
  modified_base 7: mod_base = OTHER; note = adenosine-3'-phosphate
  modified_base 8: mod_base = OTHER; note = adenosine-3'-phosphate
  modified_base 9: mod_base = OTHER; note = adenosine-3'-phosphate
  modified_base 10: mod_base = OTHER; note = adenosine-3'-phosphate
  modified_base 11: mod_base = OTHER; note = adenosine-3'-phosphate
  modified_base 12: mod_base = OTHER; note = adenosine-3'-phosphate
  modified_base 13: mod_base = OTHER; note = 2'-O-methyluridine-3'-phosphate
  modified_base 14: mod_base = OTHER; note = 2'-O-methyluridine-3'-phosphate
  modified_base 15: mod_base = OTHER; note = 2'-O-methyluridine-3'-phosphate
  modified_base 16: mod_base = OTHER; note = adenosine-3'-phosphate
  modified_base 17: mod_base = OTHER; note = guanosine-3'-phosphate
  modified_base 18: mod_base = OTHER; note = 2'-O-methyluridine-3'-phosphate
  modified_base 19: mod_base = OTHER; note = 2'-O-methyluridine-3'-phosphate
  modified_base 20: mod_base = OTHER; note = 2'-deoxythymidine-3'-phosphorothioate
  misc_feature 1..19: note = RNA
  misc_feature 20..21: note = DNA
cctgataaaaaatttagtttt

SEQ ID NO: 409 - DNA, 21 bp, synthetic construct
  source 1..21: mol_type = other DNA
  modified_base 1: mod_base = OTHER; note = guanosine-3'-phosphate
  modified_base 2: mod_base = OTHER; note = adenosine-3'-phosphate
  modified_base 3: mod_base = OTHER; note = adenosine-3'-phosphate
  modified_base 4: mod_base = OTHER; note = adenosine-3'-phosphate
  modified_base 5: mod_base = OTHER; note = adenosine-3'-phosphate
  modified_base 6: mod_base = OTHER; note = guanosine-3'-phosphate
  modified_base 7: mod_base = OTHER; note = adenosine-3'-phosphate
  modified_base 8: mod_base = OTHER; note = adenosine-3'-phosphate
  modified_base 9: mod_base = OTHER; note = adenosine-3'-phosphate
  modified_base 10: mod_base = OTHER; note = 2'-O-methyluridine-3'-phosphate
  modified_base 11: mod_base = OTHER; note = 2'-O-methylcytidine-3'-phosphate
  modified_base 12: mod_base = OTHER; note = 2'-O-methyluridine-3'-phosphate
  modified_base 13: mod_base = OTHER; note = 2'-O-methyluridine-3'-phosphate
  modified_base 14: mod_base = OTHER; note = adenosine-3'-phosphate
  modified_base 15: mod_base = OTHER; note = guanosine-3'-phosphate
  modified_base 16: mod_base = OTHER; note = 2'-O-methyluridine-3'-phosphate
  modified_base 17: mod_base = OTHER; note = adenosine-3'-phosphate
  modified_base 18: mod_base = OTHER; note = adenosine-3'-phosphate
  modified_base 19: mod_base = OTHER; note = adenosine-3'-phosphate
  modified_base 20: mod_base = OTHER; note = 2'-deoxythymidine-3'-phosphorothioate
  misc_feature 1..19: note = RNA
  misc_feature 20..21: note = DNA
gaaaagaaatcttagtaaatt

SEQ ID NO: 410 - DNA, 21 bp, synthetic construct
  source 1..21: mol_type = other DNA
  modified_base 1: mod_base = OTHER; note = 2'-O-methyluridine-3'-phosphate
  modified_base 2: mod_base = OTHER; note = 2'-O-methyluridine-3'-phosphate
  modified_base 3: mod_base = OTHER; note = adenosine-3'-phosphate
  modified_base 4: mod_base = OTHER; note = 2'-O-methyluridine-3'-phosphate
  modified_base 5: mod_base = OTHER; note = 2'-O-methylcytidine-3'-phosphate
  modified_base 6: mod_base = OTHER; note = adenosine-3'-phosphate
  modified_base 7: mod_base = OTHER; note = adenosine-3'-phosphate
  modified_base 8: mod_base = OTHER; note = adenosine-3'-phosphate
  modified_base 9: mod_base = OTHER; note = guanosine-3'-phosphate
  modified_base 10: mod_base = OTHER; note = 2'-O-methyluridine-3'-phosphate
  modified_base 11: mod_base = OTHER; note = adenosine-3'-phosphate
  modified_base 12: mod_base = OTHER; note = 2'-O-methyluridine-3'-phosphate
  modified_base 13: mod_base = OTHER; note = adenosine-3'-phosphate
  modified_base 14: mod_base = OTHER; note = adenosine-3'-phosphate
  modified_base 15: mod_base = OTHER; note = adenosine-3'-phosphate
  modified_base 16: mod_base = OTHER; note = 2'-O-methylcytidine-3'-phosphate
  modified_base 17: mod_base = OTHER; note = adenosine-3'-phosphate
  modified_base 18: mod_base = OTHER; note = 2'-O-methyluridine-3'-phosphate
  modified_base 19: mod_base = OTHER; note = 2'-O-methyluridine-3'-phosphate
  modified_base 20: mod_base = OTHER; note = 2'-deoxythymidine-3'-phosphorothioate
  misc_feature 1..19: note = RNA
  misc_feature 20..21: note = DNA
ttatcaaagtataaacatttt

SEQ ID NO: 411 - DNA, 21 bp, synthetic construct
  source 1..21: mol_type = other DNA
  modified_base 1: mod_base = OTHER; note = 2'-O-methylcytidine-3'-phosphate
  modified_base 2: mod_base = OTHER; note = 2'-O-methylcytidine-3'-phosphate
  modified_base 3: mod_base = OTHER; note = 2'-O-methyluridine-3'-phosphate
  modified_base 4: mod_base = OTHER; note = adenosine-3'-phosphate
  modified_base 5: mod_base = OTHER; note = 2'-O-methylcytidine-3'-phosphate
  modified_base 6: mod_base = OTHER; note = adenosine-3'-phosphate
  modified_base 7: mod_base = OTHER; note = adenosine-3'-phosphate
  modified_base 8: mod_base = OTHER; note = adenosine-3'-phosphate
  modified_base 9: mod_base = OTHER; note = 2'-O-methylcytidine-3'-phosphate
  modified_base 10: mod_base = OTHER; note = 2'-O-methyluridine-3'-phosphate
  modified_base 11: mod_base = OTHER; note = guanosine-3'-phosphate
  modified_base 12: mod_base = OTHER; note = adenosine-3'-phosphate
  modified_base 13: mod_base = OTHER; note = adenosine-3'-phosphate
  modified_base 14: mod_base = OTHER; note = 2'-O-methyluridine-3'-phosphate
  modified_base 15: mod_base = OTHER; note = 2'-O-methyluridine-3'-phosphate
  modified_base 16: mod_base = OTHER; note = 2'-O-methyluridine-3'-phosphate
  modified_base 17: mod_base = OTHER; note = guanosine-3'-phosphate
  modified_base 18: mod_base = OTHER; note = guanosine-3'-phosphate
  modified_base 19: mod_base = OTHER; note = 2'-O-methyluridine-3'-phosphate
  modified_base 20: mod_base = OTHER; note = 2'-deoxythymidine-3'-phosphorothioate
  misc_feature 1..19: note = RNA
  misc_feature 20..21: note = DNA
cctacaaactgaatttggttt

SEQ ID NO: 412 - DNA, 21 bp, synthetic construct
  source 1..21: mol_type = other DNA
  modified_base 1: mod_base = OTHER; note = guanosine-3'-phosphate
  modified_base 2: mod_base = OTHER; note = guanosine-3'-phosphate
  modified_base 3: mod_base = OTHER; note = adenosine-3'-phosphate
  modified_base 4: mod_base = OTHER; note = guanosine-3'-phosphate
  modified_base 5: mod_base = OTHER; note = 2'-O-methylcytidine-3'-phosphate
  modified_base 6: mod_base = OTHER; note = adenosine-3'-phosphate
  modified_base 7: mod_base = OTHER; note = adenosine-3'-phosphate
  modified_base 8: mod_base = OTHER; note = adenosine-3'-phosphate
  modified_base 9: mod_base = OTHER; note = 2'-O-methylcytidine-3'-phosphate
  modified_base 10: mod_base = OTHER; note = adenosine-3'-phosphate
  modified_base 11: mod_base = OTHER; note = 2'-O-methyluridine-3'-phosphate
  modified_base 12: mod_base = OTHER; note = adenosine-3'-phosphate
  modified_base 13: mod_base = OTHER; note = 2'-O-methyluridine-3'-phosphate
  modified_base 14: mod_base = OTHER; note = guanosine-3'-phosphate
  modified_base 15: mod_base = OTHER; note = 2'-O-methyluridine-3'-phosphate
  modified_base 16: mod_base = OTHER; note = 2'-O-methylcytidine-3'-phosphate
  modified_base 17: mod_base = OTHER; note = adenosine-3'-phosphate
  modified_base 18: mod_base = OTHER; note = 2'-O-methyluridine-3'-phosphate
  modified_base 19: mod_base = OTHER; note = 2'-O-methyluridine-3'-phosphate
  modified_base 20: mod_base = OTHER; note = 2'-deoxythymidine-3'-phosphorothioate
  misc_feature 1..19: note = RNA
  misc_feature 20..21: note = DNA
ggagcaaacatatgtcatttt

SEQ ID NO: 413 - DNA, 21 bp, synthetic construct
  source 1..21: mol_type = other DNA
  modified_base 1: mod_base = OTHER; note = adenosine-3'-phosphate
  modified_base 2: mod_base = OTHER; note = 2'-O-methyluridine-3'-phosphate
  modified_base 3: mod_base = OTHER; note = guanosine-3'-phosphate
  modified_base 4: mod_base = OTHER; note = 2'-O-methyluridine-3'-phosphate
  modified_base 5: mod_base = OTHER; note = adenosine-3'-phosphate
  modified_base 6: mod_base = OTHER; note = adenosine-3'-phosphate
  modified_base 7: mod_base = OTHER; note = 2'-O-methylcytidine-3'-phosphate
  modified_base 8: mod_base = OTHER; note = adenosine-3'-phosphate
  modified_base 9: mod_base = OTHER; note = adenosine-3'-phosphate
  modified_base 10: mod_base = OTHER; note = 2'-O-methylcytidine-3'-phosphate
  modified_base 11: mod_base = OTHER; note = 2'-O-methyluridine-3'-phosphate
  modified_base 12: mod_base = OTHER; note = guanosine-3'-phosphate
  modified_base 13: mod_base = OTHER; note = 2'-O-methyluridine-3'-phosphate
  modified_base 14: mod_base = OTHER; note = adenosine-3'-phosphate
  modified_base 15: mod_base = OTHER; note = guanosine-3'-phosphate
  modified_base 16: mod_base = OTHER; note = 2'-O-methyluridine-3'-phosphate
  modified_base 17: mod_base = OTHER; note = 2'-O-methyluridine-3'-phosphate
  modified_base 18: mod_base = OTHER; note = 2'-O-methylcytidine-3'-phosphate
  modified_base 19: mod_base = OTHER; note = adenosine-3'-phosphate
  modified_base 20: mod_base = OTHER; note = 2'-deoxythymidine-3'-phosphorothioate
  misc_feature 1..19: note = RNA
  misc_feature 20..21: note = DNA
atgtaacaactgtagttcatt

SEQ ID NO: 414 - DNA, 21 bp, synthetic construct
  source 1..21: mol_type = other DNA
  modified_base 1: mod_base = OTHER; note = guanosine-3'-phosphate
  modified_base 2: mod_base = OTHER; note = guanosine-3'-phosphate
  modified_base 3: mod_base = OTHER; note = adenosine-3'-phosphate
  modified_base 4: mod_base = OTHER; note = adenosine-3'-phosphate
  modified_base 5: mod_base = OTHER; note = adenosine-3'-phosphate
  modified_base 6: mod_base = OTHER; note = 2'-O-methyluridine-3'-phosphate
  modified_base 7: mod_base = OTHER; note = 2'-O-methylcytidine-3'-phosphate
  modified_base 8: mod_base = OTHER; note = adenosine-3'-phosphate
  modified_base 9: mod_base = OTHER; note = 2'-O-methyluridine-3'-phosphate
  modified_base 10: mod_base = OTHER; note = 2'-O-methyluridine-3'-phosphate
  modified_base 11: mod_base = OTHER; note = guanosine-3'-phosphate
  modified_base 12: mod_base = OTHER; note = guanosine-3'-phosphate
  modified_base 13: mod_base = OTHER; note = adenosine-3'-phosphate
  modified_base 14: mod_base = OTHER; note = adenosine-3'-phosphate
  modified_base 15: mod_base = OTHER; note = 2'-O-methylcytidine-3'-phosphate
  modified_base 16: mod_base = OTHER; note = adenosine-3'-phosphate
  modified_base 17: mod_base = OTHER; note = 2'-O-methyluridine-3'-phosphate
  modified_base 18: mod_base = OTHER; note = 2'-O-methyluridine-3'-phosphate
  modified_base 19: mod_base = OTHER; note = 2'-O-methyluridine-3'-phosphate
  modified_base 20: mod_base = OTHER; note = 2'-deoxythymidine-3'-phosphorothioate
  misc_feature 1..19: note = RNA
  misc_feature 20..21: note = DNA
ggaaatcattggaacattttt

SEQ ID NO: 415 - DNA, 21 bp, synthetic construct
  source 1..21: mol_type = other DNA
  modified_base 1: mod_base = OTHER; note = 2'-O-methyluridine-3'-phosphate
  modified_base 2: mod_base = OTHER; note = adenosine-3'-phosphate
  modified_base 3: mod_base = OTHER; note = adenosine-3'-phosphate
  modified_base 4: mod_base = OTHER; note = guanosine-3'-phosphate
  modified_base 5: mod_base = OTHER; note = adenosine-3'-phosphate
  modified_base 6: mod_base = OTHER; note = adenosine-3'-phosphate
  modified_base 7: mod_base = OTHER; note = 2'-O-methyluridine-3'-phosphate
  modified_base 8: mod_base = OTHER; note = 2'-O-methyluridine-3'-phosphate
  modified_base 9: mod_base = OTHER; note = 2'-O-methyluridine-3'-phosphate
  modified_base 10: mod_base = OTHER; note = 2'-O-methyluridine-3'-phosphate
  modified_base 11: mod_base = OTHER; note = guanosine-3'-phosphate
  modified_base 12: mod_base = OTHER; note = adenosine-3'-phosphate
  modified_base 13: mod_base = OTHER; note = adenosine-3'-phosphate
  modified_base 14: mod_base = OTHER; note = adenosine-3'-phosphate
  modified_base 15: mod_base = OTHER; note = 2'-O-methyluridine-3'-phosphate
  modified_base 16: mod_base = OTHER; note = 2'-O-methyluridine-3'-phosphate
  modified_base 17: mod_base = OTHER; note = adenosine-3'-phosphate
  modified_base 18: mod_base = OTHER; note = 2'-O-methylcytidine-3'-phosphate
  modified_base 19: mod_base = OTHER; note = 2'-O-methyluridine-3'-phosphate
  modified_base 20: mod_base = OTHER; note = 2'-deoxythymidine-3'-phosphorothioate
  misc_feature 1..19: note = RNA
  misc_feature 20..21: note = DNA
taagaattttgaaattacttt

SEQ ID NO: 416 - DNA, 21 bp, synthetic construct
  source 1..21: mol_type = other DNA
  modified_base 1: mod_base = OTHER; note = 2'-O-methyluridine-3'-phosphate
  modified_base 2: mod_base = OTHER; note = 2'-O-methyluridine-3'-phosphate
  modified_base 3: mod_base = OTHER; note = 2'-O-methylcytidine-3'-phosphate
  modified_base 4: mod_base = OTHER; note = 2'-O-methyluridine-3'-phosphate
  modified_base 5: mod_base = OTHER; note = guanosine-3'-phosphate
  modified_base 6: mod_base = OTHER; note = 2'-O-methylcytidine-3'-phosphate
  modified_base 7: mod_base = OTHER; note = adenosine-3'-phosphate
  modified_base 8: mod_base = OTHER; note = adenosine-3'-phosphate
  modified_base 9: mod_base = OTHER; note = 2'-O-methylcytidine-3'-phosphate
  modified_base 10: mod_base = OTHER; note = 2'-O-methyluridine-3'-phosphate
  modified_base 11: mod_base = OTHER; note = guanosine-3'-phosphate
  modified_base 12: mod_base = OTHER; note = adenosine-3'-phosphate
  modified_base 13: mod_base = OTHER; note = adenosine-3'-phosphate
  modified_base 14: mod_base = OTHER; note = 2'-O-methyluridine-3'-phosphate
  modified_base 15: mod_base = OTHER; note = 2'-O-methyluridine-3'-phosphate
  modified_base 16: mod_base = OTHER; note = 2'-O-methylcytidine-3'-phosphate
  modified_base 17: mod_base = OTHER; note = guanosine-3'-phosphate
  modified_base 18: mod_base = OTHER; note = adenosine-3'-phosphate
  modified_base 19: mod_base = OTHER; note = 2'-O-methyluridine-3'-phosphate
  modified_base 20: mod_base = OTHER; note = 2'-deoxythymidine-3'-phosphorothioate
  misc_feature 1..19: note = RNA
  misc_feature 20..21: note = DNA
ttctgcaactgaattcgattt

SEQ ID NO: 417 - DNA, 21 bp, synthetic construct
  source 1..21: mol_type = other DNA
  modified_base 1: mod_base = OTHER; note = 2'-O-methylcytidine-3'-phosphate
  modified_base 2: mod_base = OTHER; note = 2'-O-methylcytidine-3'-phosphate
  modified_base 3: mod_base = OTHER; note = 2'-O-methyluridine-3'-phosphate
  modified_base 4: mod_base = OTHER; note = 2'-O-methyluridine-3'-phosphate
  modified_base 5: mod_base = OTHER; note = guanosine-3'-phosphate
  modified_base 6: mod_base = OTHER; note = guanosine-3'-phosphate
  modified_base 7: mod_base = OTHER; note = adenosine-3'-phosphate
  modified_base 8: mod_base = OTHER; note = adenosine-3'-phosphate
  modified_base 9: mod_base = OTHER; note = adenosine-3'-phosphate
  modified_base 10: mod_base = OTHER; note = guanosine-3'-phosphate
  modified_base 11: mod_base = OTHER; note = adenosine-3'-phosphate
  modified_base 12: mod_base = OTHER; note = guanosine-3'-phosphate
  modified_base 13: mod_base = OTHER; note = 2'-O-methyluridine-3'-phosphate
  modified_base 14: mod_base = OTHER; note = adenosine-3'-phosphate
  modified_base 15: mod_base = OTHER; note = 2'-O-methyluridine-3'-phosphate
  modified_base 16: mod_base = OTHER; note = 2'-O-methyluridine-3'-phosphate
  modified_base 17: mod_base = OTHER; note = 2'-O-methyluridine-3'-phosphate
  modified_base 18: mod_base = OTHER; note = 2'-O-methylcytidine-3'-phosphate
  modified_base 19: mod_base = OTHER; note = adenosine-3'-phosphate
  modified_base 20: mod_base = OTHER; note = 2'-deoxythymidine-3'-phosphorothioate
  misc_feature 1..19: note = RNA
  misc_feature 20..21: note = DNA
ccttggaaagagtatttcatt

SEQ ID NO: 418 - DNA, 21 bp, synthetic construct
  source 1..21: mol_type = other DNA
  modified_base 1: mod_base = OTHER; note = 2'-O-methyluridine-3'-phosphate
  modified_base 2: mod_base = OTHER; note = guanosine-3'-phosphate
  modified_base 3: mod_base = OTHER; note = adenosine-3'-phosphate
  modified_base 4: mod_base = OTHER; note = 2'-O-methyluridine-3'-phosphate
  modified_base 5: mod_base = OTHER; note = adenosine-3'-phosphate
  modified_base 6: mod_base = OTHER; note = adenosine-3'-phosphate
  modified_base 7: mod_base = OTHER; note = adenosine-3'-phosphate
  modified_base 8: mod_base = OTHER; note = adenosine-3'-phosphate
  modified_base 9: mod_base = OTHER; note = adenosine-3'-phosphate
  modified_base 10: mod_base = OTHER; note = adenosine-3'-phosphate
  modified_base 11: mod_base = OTHER; note = 2'-O-methyluridine-3'-phosphate
  modified_base 12: mod_base = OTHER; note = 2'-O-methyluridine-3'-phosphate
  modified_base 13: mod_base = OTHER; note = 2'-O-methyluridine-3'-phosphate
  modified_base 14: mod_base = OTHER; note = adenosine-3'-phosphate
  modified_base 15: mod_base = OTHER; note = guanosine-3'-phosphate
  modified_base 16: mod_base = OTHER; note = 2'-O-methyluridine-3'-phosphate
  modified_base 17: mod_base = OTHER; note = 2'-O-methyluridine-3'-phosphate
  modified_base 18: mod_base = OTHER; note = adenosine-3'-phosphate
  modified_base 19: mod_base = OTHER; note = 2'-O-methylcytidine-3'-phosphate
  modified_base 20: mod_base = OTHER; note = 2'-deoxythymidine-3'-phosphorothioate
  misc_feature 1..19: note = RNA
  misc_feature 20..21: note = DNA
tgataaaaaatttagttactt

SEQ ID NO: 419 - DNA, 21 bp, synthetic construct
  source 1..21: mol_type = other DNA
  modified_base 1: mod_base = OTHER; note = 2'-O-methylcytidine-3'-phosphate
  modified_base 2: mod_base = OTHER; note = 2'-O-methyluridine-3'-phosphate
  modified_base 3: mod_base = OTHER; note = 2'-O-methyluridine-3'-phosphate
  modified_base 4: mod_base = OTHER; note = guanosine-3'-phosphate
  modified_base 5: mod_base = OTHER; note = guanosine-3'-phosphate
  modified_base 6: mod_base = OTHER; note = adenosine-3'-phosphate
  modified_base 7: mod_base = OTHER; note = adenosine-3'-phosphate
  modified_base 8: mod_base = OTHER; note = adenosine-3'-phosphate
  modified_base 9: mod_base = OTHER; note = guanosine-3'-phosphate
  modified_base 10: mod_base = OTHER; note = adenosine-3'-phosphate
  modified_base 11: mod_base = OTHER; note = guanosine-3'-phosphate
  modified_base 12: mod_base = OTHER; note = 2'-O-methyluridine-3'-phosphate
  modified_base 13: mod_base = OTHER; note = adenosine-3'-phosphate
  modified_base 14: mod_base = OTHER; note = 2'-O-methyluridine-3'-phosphate
  modified_base 15: mod_base = OTHER; note = 2'-O-methyluridine-3'-phosphate
  modified_base 16: mod_base = OTHER; note = 2'-O-methyluridine-3'-phosphate
  modified_base 17: mod_base = OTHER; note = 2'-O-methylcytidine-3'-phosphate
  modified_base 18: mod_base = OTHER; note = adenosine-3'-phosphate
  modified_base 19: mod_base = OTHER; note = adenosine-3'-phosphate
  modified_base 20: mod_base = OTHER; note = 2'-deoxythymidine-3'-phosphorothioate
  misc_feature 1..19: note = RNA
  misc_feature 20..21: note = DNA
cttggaaagagtatttcaatt

SEQ ID NO: 420 - DNA, 21 bp, synthetic construct
  source 1..21: mol_type = other DNA
  modified_base 1: mod_base = OTHER; note = cytidine-3'-phosphate
  modified_base 2: mod_base = OTHER; note = adenosine-3'-phosphate
  modified_base 3: mod_base = OTHER; note = cytidine-3'-phosphate
  modified_base 4: mod_base = OTHER; note = uridine-3'-phosphate
  modified_base 5: mod_base = OTHER; note = adenosine-3'-phosphate
  modified_base 6: mod_base = OTHER; note = uridine-3'-phosphate
  modified_base 7: mod_base = OTHER; note = adenosine-3'-phosphate
  modified_base 8: mod_base = OTHER; note = adenosine-3'-phosphate
  modified_base 9: mod_base = OTHER; note = uridine-3'-phosphate
  modified_base 10: mod_base = OTHER; note = uridine-3'-phosphate
  modified_base 11: mod_base = OTHER; note = adenosine-3'-phosphate
  modified_base 12: mod_base = OTHER; note = cytidine-3'-phosphate
  modified_base 13: mod_base = OTHER; note = uridine-3'-phosphate
  modified_base 14: mod_base = OTHER; note = uridine-3'-phosphate
  modified_base 15: mod_base = OTHER; note = guanosine-3'-phosphate
  modified_base 16: mod_base = OTHER; note = adenosine-3'-phosphate
  modified_base 17: mod_base = OTHER; note = uridine-3'-phosphate
  modified_base 18: mod_base = OTHER; note = uridine-3'-phosphate
  modified_base 19: mod_base = OTHER; note = uridine-3'-phosphate
  misc_feature 1..19: note = RNA
  misc_feature 20..21: note = DNA
cactataattacttgattttt

SEQ ID NO: 421 - DNA, 21 bp, synthetic construct
  source 1..21: mol_type = other DNA
  modified_base 1: mod_base = OTHER; note = uridine-3'-phosphate
  modified_base 2: mod_base = OTHER; note = adenosine-3'-phosphate
  modified_base 3: mod_base = OTHER; note = adenosine-3'-phosphate
  modified_base 4: mod_base = OTHER; note = cytidine-3'-phosphate
  modified_base 5: mod_base = OTHER; note = uridine-3'-phosphate
  modified_base 6: mod_base = OTHER; note = cytidine-3'-phosphate
  modified_base 7: mod_base = OTHER; note = adenosine-3'-phosphate
  modified_base 8: mod_base = OTHER; note = cytidine-3'-phosphate
  modified_base 9: mod_base = OTHER; note = uridine-3'-phosphate
  modified_base 10: mod_base = OTHER; note = adenosine-3'-phosphate
  modified_base 11: mod_base = OTHER; note = uridine-3'-phosphate
  modified_base 12: mod_base = OTHER; note = adenosine-3'-phosphate
  modified_base 13: mod_base = OTHER; note = adenosine-3'-phosphate
  modified_base 14: mod_base = OTHER; note = uridine-3'-phosphate
  modified_base 15: mod_base = OTHER; note = uridine-3'-phosphate
  modified_base 16: mod_base = OTHER; note = adenosine-3'-phosphate
  modified_base 17: mod_base = OTHER; note = cytidine-3'-phosphate
  modified_base 18: mod_base = OTHER; note = uridine-3'-phosphate
  modified_base 19: mod_base = OTHER; note = uridine-3'-phosphate
  misc_feature 1..19: note = RNA
  misc_feature 20..21: note = DNA
taactcactataattactttt

SEQ ID NO: 422 - DNA, 21 bp, synthetic construct
  source 1..21: mol_type = other DNA
  modified_base 1: mod_base = OTHER; note = adenosine-3'-phosphate
  modified_base 2: mod_base = OTHER; note = cytidine-3'-phosphate
  modified_base 3: mod_base = OTHER; note = adenosine-3'-phosphate
  modified_base 4: mod_base = OTHER; note = adenosine-3'-phosphate
  modified_base 5: mod_base = OTHER; note = adenosine-3'-phosphate
  modified_base 6: mod_base = OTHER; note = adenosine-3'-phosphate
  modified_base 7: mod_base = OTHER; note = uridine-3'-phosphate
  modified_base 8: mod_base = OTHER; note = adenosine-3'-phosphate
  modified_base 9: mod_base = OTHER; note = adenosine-3'-phosphate
  modified_base 10: mod_base = OTHER; note = cytidine-3'-phosphate
  modified_base 11: mod_base = OTHER; note = uridine-3'-phosphate
  modified_base 12: mod_base = OTHER; note = cytidine-3'-phosphate
  modified_base 13: mod_base = OTHER; note = adenosine-3'-phosphate
  modified_base 14: mod_base = OTHER; note = cytidine-3'-phosphate
  modified_base 15: mod_base = OTHER; note = uridine-3'-phosphate
  modified_base 16: mod_base = OTHER; note = adenosine-3'-phosphate
  modified_base 17: mod_base = OTHER; note = uridine-3'-phosphate
  modified_base 18: mod_base = OTHER; note = adenosine-3'-phosphate
  modified_base 19: mod_base = OTHER; note = adenosine-3'-phosphate
  misc_feature 1..19: note = RNA
  misc_feature 20..21: note = DNA
acaaaataactcactataatt

SEQ ID NO: 423 - DNA, 21 bp, synthetic construct
  source 1..21: mol_type = other DNA
  modified_base 1: mod_base = OTHER; note = uridine-3'-phosphate
  modified_base 2: mod_base = OTHER; note = cytidine-3'-phosphate
  modified_base 3: mod_base = OTHER; note = cytidine-3'-phosphate
  modified_base 4: mod_base = OTHER; note = uridine-3'-phosphate
  modified_base 5: mod_base = OTHER; note = cytidine-3'-phosphate
  modified_base 6: mod_base = OTHER; note = uridine-3'-phosphate
  modified_base 7: mod_base = OTHER; note = guanosine-3'-phosphate
  modified_base 8: mod_base = OTHER; note = guanosine-3'-phosphate
  modified_base 9: mod_base = OTHER; note = adenosine-3'-phosphate
  modified_base 10: mod_base = OTHER; note = adenosine-3'-phosphate
  modified_base 11: mod_base = OTHER; note = adenosine-3'-phosphate
  modified_base 12: mod_base = OTHER; note = uridine-3'-phosphate
  modified_base 13: mod_base = OTHER; note = uridine-3'-phosphate
  modified_base 14: mod_base = OTHER; note = guanosine-3'-phosphate
  modified_base 15: mod_base = OTHER; note = guanosine-3'-phosphate
  modified_base 16: mod_base = OTHER; note = cytidine-3'-phosphate
  modified_base 17: mod_base = OTHER; note = cytidine-3'-phosphate
  modified_base 18: mod_base = OTHER; note = uridine-3'-phosphate
  modified_base 19: mod_base = OTHER; note = uridine-3'-phosphate
  misc_feature 1..19: note = RNA
  misc_feature 20..21: note = DNA
tcctctggaaattggcctttt

SEQ ID NO: 424 - DNA, 21 bp, synthetic construct
  source 1..21: mol_type = other DNA
  modified_base 1: mod_base = OTHER; note = cytidine-3'-phosphate
  modified_base 2: mod_base = OTHER; note = adenosine-3'-phosphate
  modified_base 3: mod_base = OTHER; note = adenosine-3'-phosphate
  modified_base 4: mod_base = OTHER; note = adenosine-3'-phosphate
  modified_base 5: mod_base = OTHER; note = adenosine-3'-phosphate
  modified_base 6: mod_base = OTHER; note = uridine-3'-phosphate
  modified_base 7: mod_base = OTHER; note = adenosine-3'-phosphate
  modified_base 8: mod_base = OTHER; note = adenosine-3'-phosphate
  modified_base 9: mod_base = OTHER; note = cytidine-3'-phosphate
  modified_base 10: mod_base = OTHER; note = uridine-3'-phosphate
  modified_base 11: mod_base = OTHER; note = cytidine-3'-phosphate
  modified_base 12: mod_base = OTHER; note = adenosine-3'-phosphate
  modified_base 13: mod_base = OTHER; note = cytidine-3'-phosphate
  modified_base 14: mod_base = OTHER; note = uridine-3'-phosphate
  modified_base 15: mod_base = OTHER; note = adenosine-3'-phosphate
  modified_base 16: mod_base = OTHER; note = uridine-3'-phosphate
  modified_base 17: mod_base = OTHER; note = adenosine-3'-phosphate
  modified_base 18: mod_base = OTHER; note = adenosine-3'-phosphate
  modified_base 19: mod_base = OTHER; note = uridine-3'-phosphate
  misc_feature 1..19: note = RNA
  misc_feature 20..21: note = DNA
caaaataactcactataattt

SEQ ID NO: 425 - DNA, 21 bp, synthetic construct
  source 1..21: mol_type = other DNA
  modified_base 1: mod_base = OTHER; note = cytidine-3'-phosphate
  modified_base 2: mod_base = OTHER; note = uridine-3'-phosphate
  modified_base 3: mod_base = OTHER; note = cytidine-3'-phosphate
  modified_base 4: mod_base = OTHER; note = uridine-3'-phosphate
  modified_base 5: mod_base = OTHER; note = guanosine-3'-phosphate
  modified_base 6: mod_base = OTHER; note = guanosine-3'-phosphate
  modified_base 7: mod_base = OTHER; note = adenosine-3'-phosphate
  modified_base 8: mod_base = OTHER; note = adenosine-3'-phosphate
  modified_base 9: mod_base = OTHER; note = adenosine-3'-phosphate
  modified_base 10: mod_base = OTHER; note = uridine-3'-phosphate
  modified_base 11: mod_base = OTHER; note = uridine-3'-phosphate
  modified_base 12: mod_base = OTHER; note = guanosine-3'-phosphate
  modified_base 13: mod_base = OTHER; note = guanosine-3'-phosphate
  modified_base 14: mod_base = OTHER; note = cytidine-3'-phosphate
  modified_base 15: mod_base = OTHER; note = cytidine-3'-phosphate
  modified_base 16: mod_base = OTHER; note = uridine-3'-phosphate
  modified_base 17: mod_base = OTHER; note = uridine-3'-phosphate
  modified_base 18: mod_base = OTHER; note = cytidine-3'-phosphate
  modified_base 19: mod_base = OTHER; note = adenosine-3'-phosphate
  misc_feature 1..19: note = RNA
  misc_feature 20..21: note = DNA
ctctggaaattggccttcatt

SEQ ID NO: 426 - DNA, 21 bp, synthetic construct
  source 1..21: mol_type = other DNA
  modified_base 1: mod_base = OTHER; note = guanosine-3'-phosphate
  modified_base 2: mod_base = OTHER; note = cytidine-3'-phosphate
  modified_base 3: mod_base = OTHER; note = adenosine-3'-phosphate
  modified_base 4: mod_base = OTHER; note = adenosine-3'-phosphate
  modified_base 5: mod_base = OTHER; note = guanosine-3'-phosphate
  modified_base 6: mod_base = OTHER; note = adenosine-3'-phosphate
  modified_base 7: mod_base = OTHER; note = uridine-3'-phosphate
  modified_base 8: mod_base = OTHER; note = adenosine-3'-phosphate
  modified_base 9: mod_base = OTHER; note = uridine-3'-phosphate
  modified_base 10: mod_base = OTHER; note = uridine-3'-phosphate
  modified_base 11: mod_base = OTHER; note = uridine-3'-phosphate
  modified_base 12: mod_base = OTHER; note = uridine-3'-phosphate
  modified_base 13: mod_base = OTHER; note = uridine-3'-phosphate
  modified_base 14: mod_base = OTHER; note = adenosine-3'-phosphate
  modified_base 15: mod_base = OTHER; note = uridine-3'-phosphate
  modified_base 16: mod_base = OTHER; note = adenosine-3'-phosphate
  modified_base 17: mod_base = OTHER; note = adenosine-3'-phosphate
  modified_base 18: mod_base = OTHER; note = uridine-3'-phosphate
  modified_base 19: mod_base = OTHER; note = adenosine-3'-phosphate
  misc_feature 1..19: note = RNA
  misc_feature 20..21: note = DNA
gcaagatatttttataatatt

SEQ ID NO: 427 - DNA, 21 bp, synthetic construct
  source 1..21: mol_type = other DNA
  modified_base 1: mod_base = OTHER; note = adenosine-3'-phosphate
  modified_base 2: mod_base = OTHER; note = adenosine-3'-phosphate
  modified_base 3: mod_base = OTHER; note = uridine-3'-phosphate
  modified_base 4: mod_base = OTHER; note = guanosine-3'-phosphate
  modified_base 5: mod_base = OTHER; note = uridine-3'-phosphate
  modified_base 6: mod_base = OTHER; note = uridine-3'-phosphate
  modified_base 7: mod_base = OTHER; note = uridine-3'-phosphate
  modified_base 8: mod_base = OTHER; note = uridine-3'-phosphate
  modified_base 9: mod_base = OTHER; note = uridine-3'-phosphate
  modified_base 10: mod_base = OTHER; note = guanosine-3'-phosphate
  modified_base 11: mod_base = OTHER; note = uridine-3'-phosphate
  modified_base 12: mod_base = OTHER; note = cytidine-3'-phosphate
  modified_base 13: mod_base = OTHER; note = adenosine-3'-phosphate
  modified_base 14: mod_base = OTHER; note = adenosine-3'-phosphate
  modified_base 15: mod_base = OTHER; note = guanosine-3'-phosphate
  modified_base 16: mod_base = OTHER; note = uridine-3'-phosphate
  modified_base 17: mod_base = OTHER; note = adenosine-3'-phosphate
  modified_base 18: mod_base = OTHER; note = cytidine-3'-phosphate
  modified_base 19: mod_base = OTHER; note = adenosine-3'-phosphate
  misc_feature 1..19: note = RNA
  misc_feature 20..21: note = DNA
aatgtttttgtcaagtacatt

SEQ ID NO: 428 - DNA, 21 bp, synthetic construct
  source 1..21: mol_type = other DNA
  modified_base 1: mod_base = OTHER; note = uridine-3'-phosphate
  modified_base 2: mod_base = OTHER; note = uridine-3'-phosphate
  modified_base 3: mod_base = OTHER; note = adenosine-3'-phosphate
  modified_base 4: mod_base = OTHER; note = adenosine-3'-phosphate
  modified_base 5: mod_base = OTHER; note = adenosine-3'-phosphate
  modified_base 6: mod_base = OTHER; note = cytidine-3'-phosphate
  modified_base 7: mod_base = OTHER; note = adenosine-3'-phosphate
  modified_base 8: mod_base = OTHER; note = adenosine-3'-phosphate
  modified_base 9: mod_base = OTHER; note = cytidine-3'-phosphate
  modified_base 10: mod_base = OTHER; note = adenosine-3'-phosphate
  modified_base 11: mod_base = OTHER; note = adenosine-3'-phosphate
  modified_base 12: mod_base = OTHER; note = guanosine-3'-phosphate
  modified_base 13: mod_base = OTHER; note = uridine-3'-phosphate
  modified_base 14: mod_base = OTHER; note = adenosine-3'-phosphate
  modified_base 15: mod_base = OTHER; note = cytidine-3'-phosphate
  modified_base 16: mod_base = OTHER; note = cytidine-3'-phosphate
  modified_base 17: mod_base = OTHER; note = uridine-3'-phosphate
  modified_base 18: mod_base = OTHER; note = uridine-3'-phosphate
  modified_base 19: mod_base = OTHER; note = uridine-3'-phosphate
  misc_feature 1..19: note = RNA
  misc_feature 20..21: note = DNA
ttaaacaacaagtaccttttt

SEQ ID NO: 429 - DNA, 21 bp, synthetic construct
  source 1..21: mol_type = other DNA
  modified_base 1: mod_base = OTHER; note = uridine-3'-phosphate
  modified_base 2: mod_base = OTHER; note = cytidine-3'-phosphate
  modified_base 3: mod_base = OTHER; note = adenosine-3'-phosphate
  modified_base 4: mod_base = OTHER; note = guanosine-3'-phosphate
  modified_base 5: mod_base = OTHER; note = adenosine-3'-phosphate
  modified_base 6: mod_base = OTHER; note = adenosine-3'-phosphate
  modified_base 7: mod_base = OTHER; note = adenosine-3'-phosphate
  modified_base 8: mod_base = OTHER; note = guanosine-3'-phosphate
  modified_base 9: mod_base = OTHER; note = uridine-3'-phosphate
  modified_base 10: mod_base = OTHER; note = cytidine-3'-phosphate
  modified_base 11: mod_base = OTHER; note = uridine-3'-phosphate
  modified_base 12: mod_base = OTHER; note = guanosine-3'-phosphate
  modified_base 13: mod_base = OTHER; note = uridine-3'-phosphate
  modified_base 14: mod_base = OTHER; note = guanosine-3'-phosphate
  modified_base 15: mod_base = OTHER; note = adenosine-3'-phosphate
  modified_base 16: mod_base = OTHER; note = adenosine-3'-phosphate
  modified_base 17: mod_base = OTHER; note = guanosine-3'-phosphate
  modified_base 18: mod_base = OTHER; note = guanosine-3'-phosphate
  modified_base 19: mod_base = OTHER; note = adenosine-3'-phosphate
  misc_feature 1..19: note = RNA
  misc_feature 20..21: note = DNA
tcagaaagtctgtgaaggatt

SEQ ID NO: 430 - DNA, 21 bp, synthetic construct
  source 1..21: mol_type = other DNA
  modified_base 1: mod_base = OTHER; note = adenosine-3'-phosphate
  modified_base 2: mod_base = OTHER; note = cytidine-3'-phosphate
  modified_base 3: mod_base = OTHER; note = uridine-3'-phosphate
  modified_base 4: mod_base = OTHER; note = guanosine-3'-phosphate
  modified_base 5: mod_base = OTHER; note = adenosine-3'-phosphate
  modified_base 6: mod_base = OTHER; note = adenosine-3'-phosphate
  modified_base 7: mod_base = OTHER; note = guanosine-3'-phosphate
  modified_base 8: mod_base = OTHER; note = cytidine-3'-phosphate
  modified_base 9: mod_base = OTHER; note = adenosine-3'-phosphate
  modified_base 10: mod_base = OTHER; note = uridine-3'-phosphate
  modified_base 11: mod_base = OTHER; note = uridine-3'-phosphate
  modified_base 12: mod_base = OTHER; note = uridine-3'-phosphate
  modified_base 13: mod_base = OTHER; note = guanosine-3'-phosphate
  modified_base 14: mod_base = OTHER; note = adenosine-3'-phosphate
  modified_base 15: mod_base = OTHER; note = uridine-3'-phosphate
  modified_base 16: mod_base = OTHER; note = guanosine-3'-phosphate
  modified_base 17: mod_base = OTHER; note = cytidine-3'-phosphate
  modified_base 18: mod_base = OTHER; note = adenosine-3'-phosphate
  modified_base 19: mod_base = OTHER; note = adenosine-3'-phosphate
  misc_feature 1..19: note = RNA
  misc_feature 20..21: note = DNA
actgaagcatttgatgcaatt

SEQ ID NO: 431 - DNA, 21 bp, synthetic construct
  source 1..21: mol_type = other DNA
  modified_base 1: mod_base = OTHER; note = adenosine-3'-phosphate
  modified_base 2: mod_base = OTHER; note = guanosine-3'-phosphate
  modified_base 3: mod_base = OTHER; note = uridine-3'-phosphate
  modified_base 4: mod_base = OTHER; note = uridine-3'-phosphate
  modified_base 5: mod_base = OTHER; note = cytidine-3'-phosphate
  modified_base 6: mod_base = OTHER; note = uridine-3'-phosphate
  modified_base 7: mod_base = OTHER; note = guanosine-3'-phosphate
  modified_base 8: mod_base = OTHER; note = uridine-3'-phosphate
  modified_base 9: mod_base = OTHER; note = guanosine-3'-phosphate
  modified_base 10: mod_base = OTHER; note = uridine-3'-phosphate
  modified_base 11: mod_base = OTHER; note = uridine-3'-phosphate
  modified_base 12: mod_base = OTHER; note = adenosine-3'-phosphate
  modified_base 13: mod_base = OTHER; note = adenosine-3'-phosphate
  modified_base 14: mod_base = OTHER; note = adenosine-3'-phosphate
  modified_base 15: mod_base = OTHER; note = adenosine-3'-phosphate
  modified_base 16: mod_base = OTHER; note = uridine-3'-phosphate
  modified_base 17: mod_base = OTHER; note = guanosine-3'-phosphate
  modified_base 18: mod_base = OTHER; note = uridine-3'-phosphate
  modified_base 19: mod_base = OTHER; note = cytidine-3'-phosphate
  misc_feature 1..19: note = RNA
  misc_feature 20..21: note = DNA
agttctgtgttaaaatgtctt

SEQ ID NO: 432 - DNA, 21 bp, synthetic construct
  source 1..21: mol_type = other DNA
  modified_base 1: mod_base = OTHER; note = 2'-deoxy-2'-fluorocytidine-3'-phosphate
  modified_base 2: mod_base = OTHER; note = adenosine-3'-phosphate
  modified_base 3: mod_base = OTHER; note = 2'-deoxy-2'-fluorocytidine-3'-phosphate
  modified_base 4: mod_base = OTHER; note = 2'-deoxy-2'-fluorouridine-3'-phosphate
  modified_base 5: mod_base = OTHER; note = adenosine-3'-phosphate
  modified_base 6: mod_base = OTHER; note = 2'-deoxy-2'-fluorouridine-3'-phosphate
  modified_base 7: mod_base = OTHER; note = adenosine-3'-phosphate
  modified_base 8: mod_base = OTHER; note = adenosine-3'-phosphate
  modified_base 9: mod_base = OTHER; note = 2'-deoxy-2'-fluorouridine-3'-phosphate
  modified_base 10: mod_base = OTHER; note = 2'-deoxy-2'-fluorouridine-3'-phosphate
  modified_base 11: mod_base = OTHER; note = adenosine-3'-phosphate
  modified_base 12: mod_base = OTHER; note = 2'-deoxy-2'-fluorocytidine-3'-phosphate
  modified_base 13: mod_base = OTHER; note = 2'-deoxy-2'-fluorouridine-3'-phosphate
  modified_base 14: mod_base = OTHER; note = 2'-deoxy-2'-fluorouridine-3'-phosphate
  modified_base 15: mod_base = OTHER; note = guanosine-3'-phosphate
  modified_base 16: mod_base = OTHER; note = adenosine-3'-phosphate
  modified_base 17: mod_base = OTHER; note = 2'-deoxy-2'-fluorouridine-3'-phosphate
  modified_base 18: mod_base = OTHER; note = 2'-deoxy-2'-fluorouridine-3'-phosphate
  modified_base 19: mod_base = OTHER; note = 2'-deoxy-2'-fluorouridine-3'-phosphate
  modified_base 20: mod_base = OTHER; note = 2'-deoxythymidine-3'-phosphorothioate
  misc_feature 1..19: note = RNA
  misc_feature 20..21: note = DNA
cactataattacttgattttt

SEQ ID NO: 433 - DNA, 21 bp, synthetic construct
  source 1..21: mol_type = other DNA
  modified_base 1: mod_base = OTHER; note = 2'-deoxy-2'-fluorouridine-3'-phosphate
  modified_base 2: mod_base = OTHER; note = adenosine-3'-phosphate
  modified_base 3: mod_base = OTHER; note = adenosine-3'-phosphate
  modified_base 4: mod_base = OTHER; note = 2'-deoxy-2'-fluorocytidine-3'-phosphate
  modified_base 5: mod_base = OTHER; note = 2'-deoxy-2'-fluorouridine-3'-phosphate
  modified_base 6: mod_base = OTHER; note = 2'-deoxy-2'-fluorocytidine-3'-phosphate
  modified_base 7: mod_base = OTHER; note = adenosine-3'-phosphate
  modified_base 8: mod_base = OTHER; note = 2'-deoxy-2'-fluorocytidine-3'-phosphate
  modified_base 9: mod_base = OTHER; note = 2'-deoxy-2'-fluorouridine-3'-phosphate
  modified_base 10: mod_base = OTHER; note = adenosine-3'-phosphate
  modified_base 11: mod_base = OTHER; note = 2'-deoxy-2'-fluorouridine-3'-phosphate
  modified_base 12: mod_base = OTHER; note = adenosine-3'-phosphate
  modified_base 13: mod_base = OTHER; note = adenosine-3'-phosphate
  modified_base 14: mod_base = OTHER; note = 2'-deoxy-2'-fluorouridine-3'-phosphate
  modified_base 15: mod_base = OTHER; note = 2'-deoxy-2'-fluorouridine-3'-phosphate
  modified_base 16: mod_base = OTHER; note = adenosine-3'-phosphate
  modified_base 17: mod_base = OTHER; note = 2'-deoxy-2'-fluorocytidine-3'-phosphate
  modified_base 18: mod_base = OTHER; note = 2'-deoxy-2'-fluorouridine-3'-phosphate
  modified_base 19: mod_base = OTHER; note = 2'-deoxy-2'-fluorouridine-3'-phosphate
  modified_base 20: mod_base = OTHER; note = 2'-deoxythymidine-3'-phosphorothioate
  misc_feature 1..19: note = RNA
  misc_feature 20..21: note = DNA
taactcactataattactttt

SEQ ID NO: 434 - DNA, 21 bp, synthetic construct
  source 1..21: mol_type = other DNA
  modified_base 1: mod_base = OTHER; note = adenosine-3'-phosphate
  modified_base 2: mod_base = OTHER; note = 2'-deoxy-2'-fluorocytidine-3'-phosphate
  modified_base 3: mod_base = OTHER; note = adenosine-3'-phosphate
  modified_base 4: mod_base = OTHER; note = adenosine-3'-phosphate
  modified_base 5: mod_base = OTHER; note = adenosine-3'-phosphate
  modified_base 6: mod_base = OTHER; note = adenosine-3'-phosphate
  modified_base 7: mod_base = OTHER; note = 2'-deoxy-2'-fluorouridine-3'-phosphate
  modified_base 8: mod_base = OTHER; note = adenosine-3'-phosphate
  modified_base 9: mod_base = OTHER; note = adenosine-3'-phosphate
  modified_base 10: mod_base = OTHER; note = 2'-deoxy-2'-fluorocytidine-3'-phosphate
  modified_base 11: mod_base = OTHER; note = 2'-deoxy-2'-fluorouridine-3'-phosphate
  modified_base 12: mod_base = OTHER; note = 2'-deoxy-2'-fluorocytidine-3'-phosphate
  modified_base 13: mod_base = OTHER; note = adenosine-3'-phosphate
  modified_base 14: mod_base = OTHER; note = 2'-deoxy-2'-fluorocytidine-3'-phosphate
  modified_base 15: mod_base = OTHER; note = 2'-deoxy-2'-fluorouridine-3'-phosphate
  modified_base 16: mod_base = OTHER; note = adenosine-3'-phosphate
  modified_base 17: mod_base = OTHER; note = 2'-deoxy-2'-fluorouridine-3'-phosphate
  modified_base 18: mod_base = OTHER; note = adenosine-3'-phosphate
  modified_base 19: mod_base = OTHER; note = adenosine-3'-phosphate
  modified_base 20: mod_base = OTHER; note = 2'-deoxythymidine-3'-phosphorothioate
  misc_feature 1..19: note = RNA
  misc_feature 20..21: note = DNA
acaaaataactcactataatt

SEQ ID NO: 435 - DNA, 21 bp, synthetic construct
  source 1..21: mol_type = other DNA
  modified_base 1: mod_base = OTHER; note = 2'-deoxy-2'-fluorouridine-3'-phosphate
  modified_base 2: mod_base = OTHER; note = 2'-deoxy-2'-fluorocytidine-3'-phosphate
  modified_base 3: mod_base = OTHER; note = 2'-deoxy-2'-fluorocytidine-3'-phosphate
  modified_base 4: mod_base = OTHER; note = 2'-deoxy-2'-fluorouridine-3'-phosphate
  modified_base 5: mod_base = OTHER; note = 2'-deoxy-2'-fluorocytidine-3'-phosphate
  modified_base 6: mod_base = OTHER; note = 2'-deoxy-2'-fluorouridine-3'-phosphate
  modified_base 7: mod_base = OTHER; note = guanosine-3'-phosphate
  modified_base 8: mod_base = OTHER; note = guanosine-3'-phosphate
  modified_base 9: mod_base = OTHER; note = adenosine-3'-phosphate
  modified_base 10: mod_base = OTHER; note = adenosine-3'-phosphate
  modified_base 11: mod_base = OTHER; note = adenosine-3'-phosphate
  modified_base 12: mod_base = OTHER; note = 2'-deoxy-2'-fluorouridine-3'-phosphate
  modified_base 13: mod_base = OTHER; note = 2'-deoxy-2'-fluorouridine-3'-phosphate
  modified_base 14: mod_base = OTHER; note = guanosine-3'-phosphate
  modified_base 15: mod_base = OTHER; note = guanosine-3'-phosphate
  modified_base 16: mod_base = OTHER; note = 2'-deoxy-2'-fluorocytidine-3'-phosphate
  modified_base 17: mod_base = OTHER; note = 2'-deoxy-2'-fluorocytidine-3'-phosphate
  modified_base 18: mod_base = OTHER; note = 2'-deoxy-2'-fluorouridine-3'-phosphate
  modified_base 19: mod_base = OTHER; note = 2'-deoxy-2'-fluorouridine-3'-phosphate
  modified_base 20: mod_base = OTHER; note = 2'-deoxythymidine-3'-phosphorothioate
  misc_feature 1..19: note = RNA
  misc_feature 20..21: note = DNA
tcctctggaaattggcctttt

SEQ ID NO: 436 - DNA, 21 bp, synthetic construct
  source 1..21: mol_type = other DNA
  modified_base 1: mod_base = OTHER; note = 2'-deoxy-2'-fluorocytidine-3'-phosphate
  modified_base 2: mod_base = OTHER; note = adenosine-3'-phosphate
  modified_base 3: mod_base = OTHER; note = adenosine-3'-phosphate
  modified_base 4: mod_base = OTHER; note = adenosine-3'-phosphate
  modified_base 5: mod_base = OTHER; note = adenosine-3'-phosphate
  modified_base 6: mod_base = OTHER; note = 2'-deoxy-2'-fluorouridine-3'-phosphate
  modified_base 7: mod_base = OTHER; note = adenosine-3'-phosphate
  modified_base 8: mod_base = OTHER; note = adenosine-3'-phosphate
  modified_base 9: mod_base = OTHER; note = 2'-deoxy-2'-fluorocytidine-3'-phosphate
  modified_base 10: mod_base = OTHER; note = 2'-deoxy-2'-fluorouridine-3'-phosphate
  modified_base 11: mod_base = OTHER; note = 2'-deoxy-2'-fluorocytidine-3'-phosphate
  modified_base 12: mod_base = OTHER; note = adenosine-3'-phosphate
  modified_base 13: mod_base = OTHER; note = 2'-deoxy-2'-fluorocytidine-3'-phosphate
  modified_base 14: mod_base = OTHER; note = 2'-deoxy-2'-fluorouridine-3'-phosphate
  modified_base 15: mod_base = OTHER; note = adenosine-3'-phosphate
  modified_base 16: mod_base = OTHER; note = 2'-deoxy-2'-fluorouridine-3'-phosphate
  modified_base 17: mod_base = OTHER; note = adenosine-3'-phosphate
  modified_base 18: mod_base = OTHER; note = adenosine-3'-phosphate
  modified_base 19: mod_base = OTHER; note = 2'-deoxy-2'-fluorouridine-3'-phosphate
  modified_base 20: mod_base = OTHER; note = 2'-deoxythymidine-3'-phosphorothioate
  misc_feature 1..19: note = RNA
  misc_feature 20..21: note = DNA
caaaataactcactataattt

SEQ ID NO: 437 - DNA, 21 bp, synthetic construct
  source 1..21: mol_type = other DNA
  modified_base 1: mod_base = OTHER; note = 2'-deoxy-2'-fluorocytidine-3'-phosphate
  modified_base 2: mod_base = OTHER; note = 2'-deoxy-2'-fluorouridine-3'-phosphate
  modified_base 3: mod_base = OTHER; note = 2'-deoxy-2'-fluorocytidine-3'-phosphate
  modified_base 4: mod_base = OTHER; note = 2'-deoxy-2'-fluorouridine-3'-phosphate
  modified_base 5: mod_base = OTHER; note = guanosine-3'-phosphate
  modified_base 6: mod_base = OTHER; note = guanosine-3'-phosphate
  modified_base 7: mod_base = OTHER; note = adenosine-3'-phosphate
  modified_base 8: mod_base = OTHER; note = adenosine-3'-phosphate
  modified_base 9: mod_base = OTHER; note = adenosine-3'-phosphate
  modified_base 10: mod_base = OTHER; note = 2'-deoxy-2'-fluorouridine-3'-phosphate
  modified_base 11: mod_base = OTHER; note = 2'-deoxy-2'-fluorouridine-3'-phosphate
  modified_base 12: mod_base = OTHER; note = guanosine-3'-phosphate
  modified_base 13: mod_base = OTHER; note = guanosine-3'-phosphate
  modified_base 14: mod_base = OTHER; note = 2'-deoxy-2'-fluorocytidine-3'-phosphate
  modified_base 15: mod_base = OTHER; note = 2'-deoxy-2'-fluorocytidine-3'-phosphate
  modified_base 16: mod_base = OTHER; note = 2'-deoxy-2'-fluorouridine-3'-phosphate
  modified_base 17: mod_base = OTHER; note = 2'-deoxy-2'-fluorouridine-3'-phosphate
  modified_base 18: mod_base = OTHER; note = 2'-deoxy-2'-fluorocytidine-3'-phosphate
  modified_base 19: mod_base = OTHER; note = adenosine-3'-phosphate
  modified_base 20: mod_base = OTHER; note = 2'-deoxythymidine-3'-phosphorothioate
  misc_feature 1..19: note = RNA
  misc_feature 20..21: note = DNA
ctctggaaattggccttcatt

SEQ ID NO: 438 - DNA, 21 bp, synthetic construct
  source 1..21: mol_type = other DNA
  modified_base 1: mod_base = OTHER; note = guanosine-3'-phosphate
  modified_base 2: mod_base = OTHER; note = 2'-deoxy-2'-fluorocytidine-3'-phosphate
  modified_base 3: mod_base = OTHER; note = adenosine-3'-phosphate
  modified_base 4: mod_base = OTHER; note = adenosine-3'-phosphate
  modified_base 5: mod_base = OTHER; note = guanosine-3'-phosphate
  modified_base 6: mod_base = OTHER; note = adenosine-3'-phosphate
  modified_base 7: mod_base = OTHER; note = 2'-deoxy-2'-fluorouridine-3'-phosphate
  modified_base 8: mod_base = OTHER; note = adenosine-3'-phosphate
  modified_base 9: mod_base = OTHER; note = 2'-deoxy-2'-fluorouridine-3'-phosphate
  modified_base 10: mod_base = OTHER; note = 2'-deoxy-2'-fluorouridine-3'-phosphate
  modified_base 11: mod_base = OTHER; note = 2'-deoxy-2'-fluorouridine-3'-phosphate
  modified_base 12: mod_base = OTHER; note = 2'-deoxy-2'-fluorouridine-3'-phosphate
  modified_base 13: mod_base = OTHER; note = 2'-deoxy-2'-fluorouridine-3'-phosphate
  modified_base 14: mod_base = OTHER; note = adenosine-3'-phosphate
  modified_base 15: mod_base = OTHER; note = 2'-deoxy-2'-fluorouridine-3'-phosphate
  modified_base 16: mod_base = OTHER; note = adenosine-3'-phosphate
  modified_base 17: mod_base = OTHER; note = adenosine-3'-phosphate
  modified_base 18: mod_base = OTHER; note = 2'-deoxy-2'-fluorouridine-3'-phosphate
  modified_base 19: mod_base = OTHER; note = adenosine-3'-phosphate
  modified_base 20: mod_base = OTHER; note = 2'-deoxythymidine-3'-phosphorothioate
  misc_feature 1..19: note = RNA
  misc_feature 20..21: note = DNA
gcaagatatttttataatatt

SEQ ID NO: 439 - DNA, 21 bp, synthetic construct
  source 1..21: mol_type = other DNA
  modified_base 1: mod_base = OTHER; note = adenosine-3'-phosphate
  modified_base 2: mod_base = OTHER; note = adenosine-3'-phosphate
  modified_base 3: mod_base = OTHER; note = 2'-deoxy-2'-fluorouridine-3'-phosphate
  modified_base 4: mod_base = OTHER; note = guanosine-3'-phosphate
  modified_base 5: mod_base = OTHER; note = 2'-deoxy-2'-fluorouridine-3'-phosphate
  modified_base 6: mod_base = OTHER; note = 2'-deoxy-2'-fluorouridine-3'-phosphate
  modified_base 7: mod_base = OTHER; note = 2'-deoxy-2'-fluorouridine-3'-phosphate
  modified_base 8: mod_base = OTHER; note = 2'-deoxy-2'-fluorouridine-3'-phosphate
  modified_base 9: mod_base = OTHER; note = 2'-deoxy-2'-fluorouridine-3'-phosphate
  modified_base 10: mod_base = OTHER; note = guanosine-3'-phosphate
  modified_base 11: mod_base = OTHER; note = 2'-deoxy-2'-fluorouridine-3'-phosphate
  modified_base 12: mod_base = OTHER; note = 2'-deoxy-2'-fluorocytidine-3'-phosphate
  modified_base 13: mod_base = OTHER; note = adenosine-3'-phosphate
  modified_base 14: mod_base = OTHER; note = adenosine-3'-phosphate
  modified_base 15: mod_base = OTHER; note = guanosine-3'-phosphate
  modified_base 16: mod_base = OTHER; note = 2'-deoxy-2'-fluorouridine-3'-phosphate
  modified_base 17: mod_base = OTHER; note = adenosine-3'-phosphate
  modified_base 18: mod_base = OTHER; note = 2'-deoxy-2'-fluorocytidine-3'-phosphate
  modified_base 19: mod_base = OTHER; note = adenosine-3'-phosphate
  modified_base 20: mod_base = OTHER; note = 2'-deoxythymidine-3'-phosphorothioate
  misc_feature 1..19: note = RNA
  misc_feature 20..21: note = DNA
aatgtttttgtcaagtacatt

SEQ ID NO: 440 - DNA, 21 bp, synthetic construct
  source 1..21: mol_type = other DNA
  modified_base 1: mod_base = OTHER; note = 2'-deoxy-2'-fluorouridine-3'-phosphate
  modified_base 2: mod_base = OTHER; note = 2'-deoxy-2'-fluorouridine-3'-phosphate
  modified_base 3: mod_base = OTHER; note = adenosine-3'-phosphate
  modified_base 4: mod_base = OTHER; note = adenosine-3'-phosphate
  modified_base 5: mod_base = OTHER; note = adenosine-3'-phosphate
  modified_base 6: mod_base = OTHER; note = 2'-deoxy-2'-fluorocytidine-3'-phosphate
  modified_base 7: mod_base = OTHER; note = adenosine-3'-phosphate
  modified_base 8: mod_base = OTHER; note = adenosine-3'-phosphate
  modified_base 9: mod_base = OTHER; note = 2'-deoxy-2'-fluorocytidine-3'-phosphate
  modified_base 10: mod_base = OTHER; note = adenosine-3'-phosphate
  modified_base 11: mod_base = OTHER; note = adenosine-3'-phosphate
  modified_base 12: mod_base = OTHER; note = guanosine-3'-phosphate
  modified_base 13: mod_base = OTHER; note = 2'-deoxy-2'-fluorouridine-3'-phosphate
  modified_base 14: mod_base = OTHER; note = adenosine-3'-phosphate
  modified_base 15: mod_base = OTHER; note = 2'-deoxy-2'-fluorocytidine-3'-phosphate
  modified_base 16: mod_base = OTHER; note = 2'-deoxy-2'-fluorocytidine-3'-phosphate
  modified_base 17: mod_base = OTHER; note = 2'-deoxy-2'-fluorouridine-3'-phosphate
  modified_base 18: mod_base = OTHER; note = 2'-deoxy-2'-fluorouridine-3'-phosphate
  modified_base 19: mod_base = OTHER; note = 2'-deoxy-2'-fluorouridine-3'-phosphate
  modified_base 20: mod_base = OTHER; note = 2'-deoxythymidine-3'-phosphorothioate
  misc_feature 1..19: note = RNA
  misc_feature 20..21: note = DNA
ttaaacaacaagtaccttttt

SEQ ID NO: 441 - DNA, 21 bp, synthetic construct
  source 1..21: mol_type = other DNA
  modified_base 1: mod_base = OTHER; note = 2'-deoxy-2'-fluorouridine-3'-phosphate
  modified_base 2: mod_base = OTHER; note = 2'-deoxy-2'-fluorocytidine-3'-phosphate
  modified_base 3: mod_base = OTHER; note = adenosine-3'-phosphate
  modified_base 4: mod_base = OTHER; note = guanosine-3'-phosphate
  modified_base 5: mod_base = OTHER; note = adenosine-3'-phosphate
  modified_base 6: mod_base = OTHER; note = adenosine-3'-phosphate
  modified_base 7: mod_base = OTHER; note = adenosine-3'-phosphate
  modified_base 8: mod_base = OTHER; note = guanosine-3'-phosphate
  modified_base 9: mod_base = OTHER; note = 2'-deoxy-2'-fluorouridine-3'-phosphate
  modified_base 10: mod_base = OTHER; note = 2'-deoxy-2'-fluorocytidine-3'-phosphate
  modified_base 11: mod_base = OTHER; note = 2'-deoxy-2'-fluorouridine-3'-phosphate
  modified_base 12: mod_base = OTHER; note = guanosine-3'-phosphate
  modified_base 13: mod_base = OTHER; note = 2'-deoxy-2'-fluorouridine-3'-phosphate
  modified_base 14: mod_base = OTHER; note = guanosine-3'-phosphate
  modified_base 15: mod_base = OTHER; note = adenosine-3'-phosphate
  modified_base 16: mod_base = OTHER; note = adenosine-3'-phosphate
  modified_base 17: mod_base = OTHER; note = guanosine-3'-phosphate
  modified_base 18: mod_base = OTHER; note = guanosine-3'-phosphate
  modified_base 19: mod_base = OTHER; note = adenosine-3'-phosphate
  modified_base 20: mod_base = OTHER; note = 2'-deoxythymidine-3'-phosphorothioate
  misc_feature 1..19: note = RNA
  misc_feature 20..21: note = DNA
tcagaaagtctgtgaaggatt

SEQ ID NO: 442 - DNA, 21 bp, synthetic construct
  source 1..21: mol_type = other DNA
  modified_base 1: mod_base = OTHER; note = adenosine-3'-phosphate
  modified_base 2: mod_base = OTHER; note = 2'-deoxy-2'-fluorocytidine-3'-phosphate
  modified_base 3: mod_base = OTHER; note = 2'-deoxy-2'-fluorouridine-3'-phosphate
  modified_base 4: mod_base = OTHER; note = guanosine-3'-phosphate
  modified_base 5: mod_base = OTHER; note = adenosine-3'-phosphate
  modified_base 6: mod_base = OTHER; note = adenosine-3'-phosphate
  modified_base 7: mod_base = OTHER; note = guanosine-3'-phosphate
  modified_base 8: mod_base = OTHER; note = 2'-deoxy-2'-fluorocytidine-3'-phosphate
  modified_base 9: mod_base = OTHER; note = adenosine-3'-phosphate
  modified_base 10: mod_base = OTHER; note = 2'-deoxy-2'-fluorouridine-3'-phosphate
  modified_base 11: mod_base = OTHER; note = 2'-deoxy-2'-fluorouridine-3'-phosphate
  modified_base 12: mod_base = OTHER; note = 2'-deoxy-2'-fluorouridine-3'-phosphate
  modified_base 13: mod_base = OTHER; note = guanosine-3'-phosphate
  modified_base 14: mod_base = OTHER; note = adenosine-3'-phosphate
  modified_base 15: mod_base = OTHER; note = 2'-deoxy-2'-fluorouridine-3'-phosphate
  modified_base 16: mod_base = OTHER; note = guanosine-3'-phosphate
  modified_base 17: mod_base = OTHER; note = 2'-deoxy-2'-fluorocytidine-3'-phosphate
  modified_base 18: mod_base = OTHER; note = adenosine-3'-phosphate
  modified_base 19: mod_base = OTHER; note = adenosine-3'-phosphate
  modified_base 20: mod_base = OTHER; note = 2'-deoxythymidine-3'-phosphorothioate
  misc_feature 1..19: note = RNA
  misc_feature 20..21: note = DNA
actgaagcatttgatgcaatt

SEQ ID NO: 443 - DNA, 21 bp, synthetic construct
  source 1..21: mol_type = other DNA
  modified_base 1: mod_base = OTHER; note = adenosine-3'-phosphate
  modified_base 2: mod_base = OTHER; note = guanosine-3'-phosphate
  modified_base 3: mod_base = OTHER; note = 2'-deoxy-2'-fluorouridine-3'-phosphate
  modified_base 4: mod_base = OTHER; note = 2'-deoxy-2'-fluorouridine-3'-phosphate
  modified_base 5: mod_base = OTHER; note = 2'-deoxy-2'-fluorocytidine-3'-phosphate
  modified_base 6: mod_base = OTHER; note = 2'-deoxy-2'-fluorouridine-3'-phosphate
  modified_base 7: mod_base = OTHER; note = guanosine-3'-phosphate
  modified_base 8: mod_base = OTHER; note = 2'-deoxy-2'-fluorouridine-3'-phosphate
  modified_base 9: mod_base = OTHER; note = guanosine-3'-phosphate
  modified_base 10: mod_base = OTHER; note = 2'-deoxy-2'-fluorouridine-3'-phosphate
  modified_base 11: mod_base = OTHER; note = 2'-deoxy-2'-fluorouridine-3'-phosphate
  modified_base 12: mod_base = OTHER; note = adenosine-3'-phosphate
  modified_base 13: mod_base = OTHER; note = adenosine-3'-phosphate
  modified_base 14: mod_base = OTHER; note = adenosine-3'-phosphate
  modified_base 15: mod_base = OTHER; note = adenosine-3'-phosphate
  modified_base 16: mod_base = OTHER; note = 2'-deoxy-2'-fluorouridine-3'-phosphate
  modified_base 17: mod_base = OTHER; note = guanosine-3'-phosphate
  modified_base 18: mod_base = OTHER; note = 2'-deoxy-2'-fluorouridine-3'-phosphate
  modified_base 19: mod_base = OTHER; note = 2'-deoxy-2'-fluorocytidine-3'-phosphate
  modified_base 20: mod_base = OTHER; note = 2'-deoxythymidine-3'-phosphorothioate
  misc_feature 1..19: note = RNA
  misc_feature 20..21: note = DNA
agttctgtgttaaaatgtctt

SEQ ID NO: 444 - DNA, 21 bp, synthetic construct
  source 1..21: mol_type = other DNA
  modified_base 1: mod_base = OTHER; note = 2'-O-methylcytidine-3'-phosphate
  modified_base 2: mod_base = OTHER; note = adenosine-3'-phosphate
  modified_base 3: mod_base = OTHER; note = 2'-O-methylcytidine-3'-phosphate
  modified_base 4: mod_base = OTHER; note = 2'-O-methyluridine-3'-phosphate
  modified_base 5: mod_base = OTHER; note = adenosine-3'-phosphate
  modified_base 6: mod_base = OTHER; note = 2'-O-methyluridine-3'-phosphate
  modified_base 7: mod_base = OTHER; note = adenosine-3'-phosphate
  modified_base 8: mod_base = OTHER; note = adenosine-3'-phosphate
  modified_base 9: mod_base = OTHER; note = 2'-O-methyluridine-3'-phosphate
  modified_base 10: mod_base = OTHER; note = 2'-O-methyluridine-3'-phosphate
  modified_base 11: mod_base = OTHER; note = adenosine-3'-phosphate
  modified_base 12: mod_base = OTHER; note = 2'-O-methylcytidine-3'-phosphate
  modified_base 13: mod_base = OTHER; note = 2'-O-methyluridine-3'-phosphate
  modified_base 14: mod_base = OTHER; note = 2'-O-methyluridine-3'-phosphate
  modified_base 15: mod_base = OTHER; note = guanosine-3'-phosphate
  modified_base 16: mod_base = OTHER; note = adenosine-3'-phosphate
  modified_base 17: mod_base = OTHER; note = 2'-O-methyluridine-3'-phosphate
  modified_base 18: mod_base = OTHER; note = 2'-O-methyluridine-3'-phosphate
  modified_base 19: mod_base = OTHER; note = 2'-O-methyluridine-3'-phosphate
  modified_base 20: mod_base = OTHER; note = 2'-deoxythymidine-3'-phosphorothioate
  misc_feature 1..19: note = RNA
  misc_feature 20..21: note = DNA
cactataattacttgattttt

SEQ ID NO: 445 - DNA, 21 bp, synthetic construct
  source 1..21: mol_type = other DNA
  modified_base 1: mod_base = OTHER; note = 2'-O-methyluridine-3'-phosphate
  modified_base 2: mod_base = OTHER; note = adenosine-3'-phosphate
  modified_base 3: mod_base = OTHER; note = adenosine-3'-phosphate
  modified_base 4: mod_base = OTHER; note = 2'-O-methylcytidine-3'-phosphate
  modified_base 5: mod_base = OTHER; note = 2'-O-methyluridine-3'-phosphate
  modified_base 6: mod_base = OTHER; note = 2'-O-methylcytidine-3'-phosphate
  modified_base 7: mod_base = OTHER; note = adenosine-3'-phosphate
  modified_base 8: mod_base = OTHER; note = 2'-O-methylcytidine-3'-phosphate
  modified_base 9: mod_base = OTHER; note = 2'-O-methyluridine-3'-phosphate
  modified_base 10: mod_base = OTHER; note = adenosine-3'-phosphate
  modified_base 11: mod_base = OTHER; note = 2'-O-methyluridine-3'-phosphate
  modified_base 12: mod_base = OTHER; note = adenosine-3'-phosphate
  modified_base 13: mod_base = OTHER; note = adenosine-3'-phosphate
  modified_base 14: mod_base = OTHER; note = 2'-O-methyluridine-3'-phosphate
  modified_base 15: mod_base = OTHER; note = 2'-O-methyluridine-3'-phosphate
  modified_base 16: mod_base = OTHER; note = adenosine-3'-phosphate
  modified_base 17: mod_base = OTHER; note = 2'-O-methylcytidine-3'-phosphate
  modified_base 18: mod_base = OTHER; note = 2'-O-methyluridine-3'-phosphate
  modified_base 19: mod_base = OTHER; note = 2'-O-methyluridine-3'-phosphate
  modified_base 20: mod_base = OTHER; note = 2'-deoxythymidine-3'-phosphorothioate
  misc_feature 1..19: note = RNA
  misc_feature 20..21: note = DNA
taactcactataattactttt

SEQ ID NO: 446 - DNA, 21 bp, synthetic construct
  source 1..21: mol_type = other DNA
  modified_base 1: mod_base = OTHER; note = adenosine-3'-phosphate
  modified_base 2: mod_base = OTHER; note = 2'-O-methylcytidine-3'-phosphate
  modified_base 3: mod_base = OTHER; note = adenosine-3'-phosphate
  modified_base 4: mod_base = OTHER; note = adenosine-3'-phosphate
  modified_base 5: mod_base = OTHER; note = adenosine-3'-phosphate
  modified_base 6: mod_base = OTHER; note = adenosine-3'-phosphate
  modified_base 7: mod_base = OTHER; note = 2'-O-methyluridine-3'-phosphate
  modified_base 8: mod_base = OTHER; note = adenosine-3'-phosphate
  modified_base 9: mod_base = OTHER; note = adenosine-3'-phosphate
  modified_base 10: mod_base = OTHER; note = 2'-O-methylcytidine-3'-phosphate
  modified_base 11: mod_base = OTHER; note = 2'-O-methyluridine-3'-phosphate
  modified_base 12: mod_base = OTHER; note = 2'-O-methylcytidine-3'-phosphate
  modified_base 13: mod_base = OTHER; note = adenosine-3'-phosphate
  modified_base 14: mod_base = OTHER; note = 2'-O-methylcytidine-3'-phosphate
  modified_base 15: mod_base = OTHER; note = 2'-O-methyluridine-3'-phosphate
  modified_base 16: mod_base = OTHER; note = adenosine-3'-phosphate
  modified_base 17: mod_base = OTHER; note = 2'-O-methyluridine-3'-phosphate
  modified_base 18: mod_base = OTHER; note = adenosine-3'-phosphate
  modified_base 19: mod_base = OTHER; note = adenosine-3'-phosphate
  modified_base 20: mod_base = OTHER; note = 2'-deoxythymidine-3'-phosphorothioate
  misc_feature 1..19: note = RNA
  misc_feature 20..21: note = DNA
acaaaataactcactataatt

SEQ ID NO: 447 - DNA, 21 bp, synthetic construct
  source 1..21: mol_type = other DNA
  modified_base 1: mod_base = OTHER; note = 2'-O-methyluridine-3'-phosphate
  modified_base 2: mod_base = OTHER; note = 2'-O-methylcytidine-3'-phosphate
  modified_base 3: mod_base = OTHER; note = 2'-O-methylcytidine-3'-phosphate
  modified_base 4: mod_base = OTHER; note = 2'-O-methyluridine-3'-phosphate
  modified_base 5: mod_base = OTHER; note = 2'-O-methylcytidine-3'-phosphate
  modified_base 6: mod_base = OTHER; note = 2'-O-methyluridine-3'-phosphate
  modified_base 7: mod_base = OTHER; note = guanosine-3'-phosphate
  modified_base 8: mod_base = OTHER; note = guanosine-3'-phosphate
  modified_base 9: mod_base = OTHER; note = adenosine-3'-phosphate
  modified_base 10: mod_base = OTHER; note = adenosine-3'-phosphate
  modified_base 11: mod_base = OTHER; note = adenosine-3'-phosphate
  modified_base 12: mod_base = OTHER; note = 2'-O-methyluridine-3'-phosphate
  modified_base 13: mod_base = OTHER; note = 2'-O-methyluridine-3'-phosphate
  modified_base 14: mod_base = OTHER; note = guanosine-3'-phosphate
  modified_base 15: mod_base = OTHER; note = guanosine-3'-phosphate
  modified_base 16: mod_base = OTHER; note = 2'-O-methylcytidine-3'-phosphate
  modified_base 17: mod_base = OTHER; note = 2'-O-methylcytidine-3'-phosphate
  modified_base 18: mod_base = OTHER; note = 2'-O-methyluridine-3'-phosphate
  modified_base 19: mod_base = OTHER; note = 2'-O-methyluridine-3'-phosphate
  modified_base 20: mod_base = OTHER; note = 2'-deoxythymidine-3'-phosphorothioate
  misc_feature 1..19: note = RNA
  misc_feature 20..21: note = DNA
tcctctggaaattggcctttt

SEQ ID NO: 448 - DNA, 21 bp, synthetic construct
  source 1..21: mol_type = other DNA
  modified_base 1: mod_base = OTHER; note = 2'-O-methylcytidine-3'-phosphate
  modified_base 2: mod_base = OTHER; note = adenosine-3'-phosphate
  modified_base 3: mod_base = OTHER; note = adenosine-3'-phosphate
  modified_base 4: mod_base = OTHER; note = adenosine-3'-phosphate
  modified_base 5: mod_base = OTHER; note = adenosine-3'-phosphate
  modified_base 6: mod_base = OTHER; note = 2'-O-methyluridine-3'-phosphate
  modified_base 7: mod_base = OTHER; note = adenosine-3'-phosphate
  modified_base 8: mod_base = OTHER; note = adenosine-3'-phosphate
  modified_base 9: mod_base = OTHER; note = 2'-O-methylcytidine-3'-phosphate
  modified_base 10: mod_base = OTHER; note = 2'-O-methyluridine-3'-phosphate
  modified_base 11: mod_base = OTHER; note = 2'-O-methylcytidine-3'-phosphate
  modified_base 12: mod_base = OTHER; note = adenosine-3'-phosphate
  modified_base 13: mod_base = OTHER; note = 2'-O-methylcytidine-3'-phosphate
  modified_base 14: mod_base = OTHER; note = 2'-O-methyluridine-3'-phosphate
  modified_base 15: mod_base = OTHER; note = adenosine-3'-phosphate
  modified_base 16: mod_base = OTHER; note = 2'-O-methyluridine-3'-phosphate
  modified_base 17: mod_base = OTHER; note = adenosine-3'-phosphate
  modified_base 18: mod_base = OTHER; note = adenosine-3'-phosphate
  modified_base 19: mod_base = OTHER; note = 2'-O-methyluridine-3'-phosphate
  modified_base 20: mod_base = OTHER; note = 2'-deoxythymidine-3'-phosphorothioate
  misc_feature 1..19: note = RNA
  misc_feature 20..21: note = DNA
caaaataactcactataattt

SEQ ID NO: 449 - DNA, 21 bp, synthetic construct
  source 1..21: mol_type = other DNA
  modified_base 1: mod_base = OTHER; note = 2'-O-methylcytidine-3'-phosphate
  modified_base 2: mod_base = OTHER; note = 2'-O-methyluridine-3'-phosphate
  modified_base 3: mod_base = OTHER; note = 2'-O-methylcytidine-3'-phosphate
  modified_base 4: mod_base = OTHER; note = 2'-O-methyluridine-3'-phosphate
  modified_base 5: mod_base = OTHER; note = guanosine-3'-phosphate
  modified_base 6: mod_base = OTHER; note = guanosine-3'-phosphate
  modified_base 7: mod_base = OTHER; note = adenosine-3'-phosphate
  modified_base 8: mod_base = OTHER; note = adenosine-3'-phosphate
  modified_base 9: mod_base = OTHER; note = adenosine-3'-phosphate
  modified_base 10: mod_base = OTHER; note = 2'-O-methyluridine-3'-phosphate
  modified_base 11: mod_base = OTHER; note = 2'-O-methyluridine-3'-phosphate
  modified_base 12: mod_base = OTHER; note = guanosine-3'-phosphate
  modified_base 13: mod_base = OTHER; note = guanosine-3'-phosphate
  modified_base 14: mod_base = OTHER; note = 2'-O-methylcytidine-3'-phosphate
  modified_base 15: mod_base = OTHER; note = 2'-O-methylcytidine-3'-phosphate
  modified_base 16: mod_base = OTHER; note = 2'-O-methyluridine-3'-phosphate
  modified_base 17: mod_base = OTHER; note = 2'-O-methyluridine-3'-phosphate
  modified_base 18: mod_base = OTHER; note = 2'-O-methylcytidine-3'-phosphate
  modified_base 19: mod_base = OTHER; note = adenosine-3'-phosphate
  modified_base 20: mod_base = OTHER; note = 2'-deoxythymidine-3'-phosphorothioate
  misc_feature 1..19: note = RNA
  misc_feature 20..21: note = DNA
ctctggaaattggccttcatt

SEQ ID NO: 450 - DNA, 21 bp, synthetic construct
  source 1..21: mol_type = other DNA
  modified_base 1: mod_base = OTHER; note = guanosine-3'-phosphate
  modified_base 2: mod_base = OTHER; note = 2'-O-methylcytidine-3'-phosphate
  modified_base 3: mod_base = OTHER; note = adenosine-3'-phosphate
  modified_base 4: mod_base = OTHER; note = adenosine-3'-phosphate
  modified_base 5: mod_base = OTHER; note = guanosine-3'-phosphate
  modified_base 6: mod_base = OTHER; note = adenosine-3'-phosphate
  modified_base 7: mod_base = OTHER; note = 2'-O-methyluridine-3'-phosphate
  modified_base 8: mod_base = OTHER; note = adenosine-3'-phosphate
  modified_base 9: mod_base = OTHER; note = 2'-O-methyluridine-3'-phosphate
  modified_base 10: mod_base = OTHER; note = 2'-O-methyluridine-3'-phosphate
  modified_base 11: mod_base = OTHER; note = 2'-O-methyluridine-3'-phosphate
  modified_base 12: mod_base = OTHER; note = 2'-O-methyluridine-3'-phosphate
  modified_base 13: mod_base = OTHER; note = 2'-O-methyluridine-3'-phosphate
  modified_base 14: mod_base = OTHER; note = adenosine-3'-phosphate
  modified_base 15: mod_base = OTHER; note = 2'-O-methyluridine-3'-phosphate
  modified_base 16: mod_base = OTHER; note = adenosine-3'-phosphate
  modified_base 17: mod_base = OTHER; note = adenosine-3'-phosphate
  modified_base 18: mod_base = OTHER; note = 2'-O-methyluridine-3'-phosphate
  modified_base 19: mod_base = OTHER; note = adenosine-3'-phosphate
  modified_base 20: mod_base = OTHER; note = 2'-deoxythymidine-3'-phosphorothioate
  misc_feature 1..19: note = RNA
  misc_feature 20..21: note = DNA
gcaagatatttttataatatt

SEQ ID NO: 451 - DNA, 21 bp, synthetic construct
  source 1..21: mol_type = other DNA
  modified_base 1: mod_base = OTHER; note = adenosine-3'-phosphate
  modified_base 2: mod_base = OTHER; note = adenosine-3'-phosphate
  modified_base 3: mod_base = OTHER; note = 2'-O-methyluridine-3'-phosphate
  modified_base 4: mod_base = OTHER; note = guanosine-3'-phosphate
  modified_base 5: mod_base = OTHER; note = 2'-O-methyluridine-3'-phosphate
  modified_base 6: mod_base = OTHER; note = 2'-O-methyluridine-3'-phosphate
  modified_base 7: mod_base = OTHER; note = 2'-O-methyluridine-3'-phosphate
  modified_base 8: mod_base = OTHER; note = 2'-O-methyluridine-3'-phosphate
  modified_base 9: mod_base = OTHER; note = 2'-O-methyluridine-3'-phosphate
  modified_base 10: mod_base = OTHER; note = guanosine-3'-phosphate
  modified_base 11: mod_base = OTHER; note = 2'-O-methyluridine-3'-phosphate
  modified_base 12: mod_base = OTHER; note = 2'-O-methylcytidine-3'-phosphate
  modified_base 13: mod_base = OTHER; note = adenosine-3'-phosphate
  modified_base 14: mod_base = OTHER; note = adenosine-3'-phosphate
  modified_base 15: mod_base = OTHER; note = guanosine-3'-phosphate
  modified_base 16: mod_base = OTHER; note = 2'-O-methyluridine-3'-phosphate
  modified_base 17: mod_base = OTHER; note = adenosine-3'-phosphate
  modified_base 18: mod_base = OTHER; note = 2'-O-methylcytidine-3'-phosphate
  modified_base 19: mod_base = OTHER; note = adenosine-3'-phosphate
  modified_base 20: mod_base = OTHER; note = 2'-deoxythymidine-3'-phosphorothioate
  misc_feature 1..19: note = RNA
  misc_feature 20..21: note = DNA
aatgtttttgtcaagtacatt

SEQ ID NO: 452 - DNA, 21 bp, synthetic construct
  source 1..21: mol_type = other DNA
  modified_base 1: mod_base = OTHER; note = 2'-O-methyluridine-3'-phosphate
  modified_base 2: mod_base = OTHER; note = 2'-O-methyluridine-3'-phosphate
  modified_base 3: mod_base = OTHER; note = adenosine-3'-phosphate
  modified_base 4: mod_base = OTHER; note = adenosine-3'-phosphate
  modified_base 5: mod_base = OTHER; note = adenosine-3'-phosphate
  modified_base 6: mod_base = OTHER; note = 2'-O-methylcytidine-3'-phosphate
  modified_base 7: mod_base = OTHER; note = adenosine-3'-phosphate
  modified_base 8: mod_base = OTHER; note = adenosine-3'-phosphate
  modified_base 9: mod_base = OTHER; note = 2'-O-methylcytidine-3'-phosphate
  modified_base 10: mod_base = OTHER; note = adenosine-3'-phosphate
  modified_base 11: mod_base = OTHER; note = adenosine-3'-phosphate
  modified_base 12: mod_base = OTHER; note = guanosine-3'-phosphate
  modified_base 13: mod_base = OTHER; note = 2'-O-methyluridine-3'-phosphate
  modified_base 14: mod_base = OTHER; note = adenosine-3'-phosphate
  modified_base 15: mod_base = OTHER; note = 2'-O-methylcytidine-3'-phosphate
  modified_base 16: mod_base = OTHER; note = 2'-O-methylcytidine-3'-phosphate
  modified_base 17: mod_base = OTHER; note = 2'-O-methyluridine-3'-phosphate
  modified_base 18: mod_base = OTHER; note = 2'-O-methyluridine-3'-phosphate
  modified_base 19: mod_base = OTHER; note = 2'-O-methyluridine-3'-phosphate
  modified_base 20: mod_base = OTHER; note = 2'-deoxythymidine-3'-phosphorothioate
  misc_feature 1..19: note = RNA
  misc_feature 20..21: note = DNA
ttaaacaacaagtaccttttt

SEQ ID NO: 453 - DNA, 21 bp, synthetic construct
  source 1..21: mol_type = other DNA
  modified_base 1: mod_base = OTHER; note = 2'-O-methyluridine-3'-phosphate
  modified_base 2: mod_base = OTHER; note = 2'-O-methylcytidine-3'-phosphate
  modified_base 3: mod_base = OTHER; note = adenosine-3'-phosphate
  modified_base 4: mod_base = OTHER; note = guanosine-3'-phosphate
  modified_base 5: mod_base = OTHER; note = adenosine-3'-phosphate
  modified_base 6: mod_base = OTHER; note = adenosine-3'-phosphate
  modified_base 7: mod_base = OTHER; note = adenosine-3'-phosphate
  modified_base 8: mod_base = OTHER; note = guanosine-3'-phosphate
  modified_base 9: mod_base = OTHER; note = 2'-O-methyluridine-3'-phosphate
  modified_base 10: mod_base = OTHER; note = 2'-O-methylcytidine-3'-phosphate
  modified_base 11: mod_base = OTHER; note = 2'-O-methyluridine-3'-phosphate
  modified_base 12: mod_base = OTHER; note = guanosine-3'-phosphate
  modified_base 13: mod_base = OTHER; note = 2'-O-methyluridine-3'-phosphate
  modified_base 14: mod_base = OTHER; note = guanosine-3'-phosphate
  modified_base 15: mod_base = OTHER; note = adenosine-3'-phosphate
  modified_base 16: mod_base = OTHER; note = adenosine-3'-phosphate
  modified_base 17: mod_base = OTHER; note = guanosine-3'-phosphate
  modified_base 18: mod_base = OTHER; note = guanosine-3'-phosphate
  modified_base 19: mod_base = OTHER; note = adenosine-3'-phosphate
  modified_base 20: mod_base = OTHER; note = 2'-deoxythymidine-3'-phosphorothioate
  misc_feature 1..19: note = RNA
  misc_feature 20..21: note = DNA
tcagaaagtctgtgaaggatt

SEQ ID NO: 454 - DNA, 21 bp, synthetic construct
  source 1..21: mol_type = other DNA
  modified_base 1: mod_base = OTHER; note = adenosine-3'-phosphate
  modified_base 2: mod_base = OTHER; note = 2'-O-methylcytidine-3'-phosphate
  modified_base 3: mod_base = OTHER; note = 2'-O-methyluridine-3'-phosphate
  modified_base 4: mod_base = OTHER; note = guanosine-3'-phosphate
  modified_base 5: mod_base = OTHER; note = adenosine-3'-phosphate
  modified_base 6: mod_base = OTHER; note = adenosine-3'-phosphate
  modified_base 7: mod_base = OTHER; note = guanosine-3'-phosphate
  modified_base 8: mod_base = OTHER; note = 2'-O-methylcytidine-3'-phosphate
  modified_base 9: mod_base = OTHER; note = adenosine-3'-phosphate
  modified_base 10: mod_base = OTHER; note = 2'-O-methyluridine-3'-phosphate
  modified_base 11: mod_base = OTHER; note = 2'-O-methyluridine-3'-phosphate
  modified_base 12: mod_base = OTHER; note = 2'-O-methyluridine-3'-phosphate
  modified_base 13: mod_base = OTHER; note = guanosine-3'-phosphate
  modified_base 14: mod_base = OTHER; note = adenosine-3'-phosphate
  modified_base 15: mod_base = OTHER; note = 2'-O-methyluridine-3'-phosphate
  modified_base 16: mod_base = OTHER; note = guanosine-3'-phosphate
  modified_base 17: mod_base = OTHER; note = 2'-O-methylcytidine-3'-phosphate
  modified_base 18: mod_base = OTHER; note = adenosine-3'-phosphate
  modified_base 19: mod_base = OTHER; note = adenosine-3'-phosphate
  modified_base 20: mod_base = OTHER; note = 2'-deoxythymidine-3'-phosphorothioate
  misc_feature 1..19: note = RNA
  misc_feature 20..21: note = DNA
actgaagcatttgatgcaatt

SEQ ID NO: 455 - DNA, 21 bp, synthetic construct
  source 1..21: mol_type = other DNA
  modified_base 1: mod_base = OTHER; note = adenosine-3'-phosphate
  modified_base 2: mod_base = OTHER; note = guanosine-3'-phosphate
  modified_base 3: mod_base = OTHER; note = 2'-O-methyluridine-3'-phosphate
  modified_base 4: mod_base = OTHER; note = 2'-O-methyluridine-3'-phosphate
  modified_base 5: mod_base = OTHER; note = 2'-O-methylcytidine-3'-phosphate
  modified_base 6: mod_base = OTHER; note = 2'-O-methyluridine-3'-phosphate
  modified_base 7: mod_base = OTHER; note = guanosine-3'-phosphate
  modified_base 8: mod_base = OTHER; note = 2'-O-methyluridine-3'-phosphate
  modified_base 9: mod_base = OTHER; note = guanosine-3'-phosphate
  modified_base 10: mod_base = OTHER; note = 2'-O-methyluridine-3'-phosphate
  modified_base 11: mod_base = OTHER; note = 2'-O-methyluridine-3'-phosphate
  modified_base 12: mod_base = OTHER; note = adenosine-3'-phosphate
  modified_base 13: mod_base = OTHER; note = adenosine-3'-phosphate
  modified_base 14: mod_base = OTHER; note = adenosine-3'-phosphate
  modified_base 15: mod_base = OTHER; note = adenosine-3'-phosphate
  modified_base 16: mod_base = OTHER; note = 2'-O-methyluridine-3'-phosphate
  modified_base 17: mod_base = OTHER; note = guanosine-3'-phosphate
  modified_base 18: mod_base = OTHER; note = 2'-O-methyluridine-3'-phosphate
  modified_base 19: mod_base = OTHER; note = 2'-O-methylcytidine-3'-phosphate
  modified_base 20: mod_base = OTHER; note = 2'-deoxythymidine-3'-phosphorothioate
  misc_feature 1..19: note = RNA
  misc_feature 20..21: note = DNA
agttctgtgttaaaatgtctt

SEQ ID NO: 456 - DNA, 21 bp, synthetic construct
  source 1..21: mol_type = other DNA
  modified_base 1: mod_base = OTHER; note = 2'-O-methylcytidine-3'-phosphate
  modified_base 2: mod_base = OTHER; note = adenosine-3'-phosphate
  modified_base 3: mod_base = OTHER; note = 2'-O-methylcytidine-3'-phosphate
  modified_base 4: mod_base = OTHER; note = 2'-O-methyluridine-3'-phosphate
  modified_base 5: mod_base = OTHER; note = adenosine-3'-phosphate
  modified_base 6: mod_base = OTHER; note = 2'-O-methyluridine-3'-phosphate
  modified_base 7: mod_base = OTHER; note = adenosine-3'-phosphate
  modified_base 8: mod_base = OTHER; note = adenosine-3'-phosphate
  modified_base 9: mod_base = OTHER; note = 2'-O-methyluridine-3'-phosphate
  modified_base 10: mod_base = OTHER; note = 2'-O-methyluridine-3'-phosphate
  modified_base 11: mod_base = OTHER; note = adenosine-3'-phosphate
  modified_base 12: mod_base = OTHER; note = 2'-O-methylcytidine-3'-phosphate
  modified_base 13: mod_base = OTHER; note = 2'-O-methyluridine-3'-phosphate
  modified_base 14: mod_base = OTHER; note = 2'-O-methyluridine-3'-phosphate
  modified_base 15: mod_base = OTHER; note = guanosine-3'-phosphate
  modified_base 16: mod_base = OTHER; note = adenosine-3'-phosphate
  modified_base 17: mod_base = OTHER; note = 2'-O-methyluridine-3'-phosphate
  modified_base 18: mod_base = OTHER; note = 2'-O-methyluridine-3'-phosphate
  modified_base 19: mod_base = OTHER; note = 2'-O-methyluridine-3'-phosphate
  modified_base 20: mod_base = OTHER; note = 2'-deoxythymidine-3'-phosphorothioate
  misc_feature 1..19: note = RNA
  misc_feature 20..21: note = DNA
cactataattacttgattttt

SEQ ID NO: 457 - DNA, 21 bp, synthetic construct
  source 1..21: mol_type = other DNA
  modified_base 1: mod_base = OTHER; note = 2'-O-methyluridine-3'-phosphate
  modified_base 2: mod_base = OTHER; note = adenosine-3'-phosphate
  modified_base 3: mod_base = OTHER; note = adenosine-3'-phosphate
  modified_base 4: mod_base = OTHER; note = 2'-O-methylcytidine-3'-phosphate
  modified_base 5: mod_base = OTHER; note = 2'-O-methyluridine-3'-phosphate
  modified_base 6: mod_base = OTHER; note = 2'-O-methylcytidine-3'-phosphate
  modified_base 7: mod_base = OTHER; note = adenosine-3'-phosphate
  modified_base 8: mod_base = OTHER; note = 2'-O-methylcytidine-3'-phosphate
  modified_base 9: mod_base = OTHER; note = 2'-O-methyluridine-3'-phosphate
  modified_base 10: mod_base = OTHER; note = adenosine-3'-phosphate
  modified_base 11: mod_base = OTHER; note = 2'-O-methyluridine-3'-phosphate
  modified_base 12: mod_base = OTHER; note = adenosine-3'-phosphate
  modified_base 13: mod_base = OTHER; note = adenosine-3'-phosphate
  modified_base 14: mod_base = OTHER; note = 2'-O-methyluridine-3'-phosphate
  modified_base 15: mod_base = OTHER; note = 2'-O-methyluridine-3'-phosphate
  modified_base 16: mod_base = OTHER; note = adenosine-3'-phosphate
  modified_base 17: mod_base = OTHER; note = 2'-O-methylcytidine-3'-phosphate
  modified_base 18: mod_base = OTHER; note = 2'-O-methyluridine-3'-phosphate
  modified_base 19: mod_base = OTHER; note = 2'-O-methyluridine-3'-phosphate
  modified_base 20: mod_base = OTHER; note = 2'-deoxythymidine-3'-phosphorothioate
  misc_feature 1..19: note = RNA
  misc_feature 20..21: note = DNA
taactcactataattactttt

SEQ ID NO: 458 - DNA, 21 bp, synthetic construct
  source 1..21: mol_type = other DNA
  modified_base 1: mod_base = OTHER; note = adenosine-3'-phosphate
  modified_base 2: mod_base = OTHER; note = 2'-O-methylcytidine-3'-phosphate
  modified_base 3: mod_base = OTHER; note = adenosine-3'-phosphate
  modified_base 4: mod_base = OTHER; note = adenosine-3'-phosphate
  modified_base 5: mod_base = OTHER; note = adenosine-3'-phosphate
  modified_base 6: mod_base = OTHER; note = adenosine-3'-phosphate
  modified_base 7: mod_base = OTHER; note = 2'-O-methyluridine-3'-phosphate
  modified_base 8: mod_base = OTHER; note = adenosine-3'-phosphate
  modified_base 9: mod_base = OTHER; note = adenosine-3'-phosphate
  modified_base 10: mod_base = OTHER; note = 2'-O-methylcytidine-3'-phosphate
  modified_base 11: mod_base = OTHER; note = 2'-O-methyluridine-3'-phosphate
  modified_base 12: mod_base = OTHER; note = 2'-O-methylcytidine-3'-phosphate
  modified_base 13: mod_base = OTHER; note = adenosine-3'-phosphate
  modified_base 14: mod_base = OTHER; note = 2'-O-methylcytidine-3'-phosphate
  modified_base 15: mod_base = OTHER; note = 2'-O-methyluridine-3'-phosphate
  modified_base 16: mod_base = OTHER; note = adenosine-3'-phosphate
  modified_base 17: mod_base = OTHER; note = 2'-O-methyluridine-3'-phosphate
  modified_base 18: mod_base = OTHER; note = adenosine-3'-phosphate
  modified_base 19: mod_base = OTHER; note = adenosine-3'-phosphate
  modified_base 20: mod_base = OTHER; note = 2'-deoxythymidine-3'-phosphorothioate
  misc_feature 1..19: note = RNA
  misc_feature 20..21: note = DNA
acaaaataactcactataatt

SEQ ID NO: 459 - DNA, 21 bp, synthetic construct
  source 1..21: mol_type = other DNA
  modified_base 1: mod_base = OTHER; note = 2'-O-methyluridine-3'-phosphate
  modified_base 2: mod_base = OTHER; note = 2'-O-methylcytidine-3'-phosphate
  modified_base 3: mod_base = OTHER; note = 2'-O-methylcytidine-3'-phosphate
  modified_base 4: mod_base = OTHER; note = 2'-O-methyluridine-3'-phosphate
  modified_base 5: mod_base = OTHER; note = 2'-O-methylcytidine-3'-phosphate
  modified_base 6: mod_base = OTHER; note = 2'-O-methyluridine-3'-phosphate
  modified_base 7: mod_base = OTHER; note = guanosine-3'-phosphate
  modified_base 8: mod_base = OTHER; note = guanosine-3'-phosphate
  modified_base 9: mod_base = OTHER; note = adenosine-3'-phosphate
  modified_base 10: mod_base = OTHER; note = adenosine-3'-phosphate
  modified_base 11: mod_base = OTHER; note = adenosine-3'-phosphate
  modified_base 12: mod_base = OTHER; note = 2'-O-methyluridine-3'-phosphate
  modified_base 13: mod_base = OTHER; note = 2'-O-methyluridine-3'-phosphate
  modified_base 14: mod_base = OTHER; note = guanosine-3'-phosphate
  modified_base 15: mod_base = OTHER; note = guanosine-3'-phosphate
  modified_base 16: mod_base = OTHER; note = 2'-O-methylcytidine-3'-phosphate
  modified_base 17: mod_base = OTHER; note = 2'-O-methylcytidine-3'-phosphate
  modified_base 18: mod_base = OTHER; note = 2'-O-methyluridine-3'-phosphate
  modified_base 19: mod_base = OTHER; note = 2'-O-methyluridine-3'-phosphate
  modified_base 20: mod_base = OTHER; note = 2'-deoxythymidine-3'-phosphorothioate
  misc_feature 1..19: note = RNA
  misc_feature 20..21: note = DNA
tcctctggaaattggcctttt

SEQ ID NO: 460 - DNA, 21 bp, synthetic construct
  source 1..21: mol_type = other DNA
  modified_base 1: mod_base = OTHER; note = 2'-O-methylcytidine-3'-phosphate
  modified_base 2: mod_base = OTHER; note = adenosine-3'-phosphate
  modified_base 3: mod_base = OTHER; note = adenosine-3'-phosphate
  modified_base 4: mod_base = OTHER; note = adenosine-3'-phosphate
  modified_base 5: mod_base = OTHER; note = adenosine-3'-phosphate
  modified_base 6: mod_base = OTHER; note = 2'-O-methyluridine-3'-phosphate
  modified_base 7: mod_base = OTHER; note = adenosine-3'-phosphate
  modified_base 8: mod_base = OTHER; note = adenosine-3'-phosphate
  modified_base 9: mod_base = OTHER; note = 2'-O-methylcytidine-3'-phosphate
  modified_base 10: mod_base = OTHER; note = 2'-O-methyluridine-3'-phosphate
  modified_base 11: mod_base = OTHER; note = 2'-O-methylcytidine-3'-phosphate
  modified_base 12: mod_base = OTHER; note = adenosine-3'-phosphate
  modified_base 13: mod_base = OTHER; note = 2'-O-methylcytidine-3'-phosphate
  modified_base 14: mod_base = OTHER; note = 2'-O-methyluridine-3'-phosphate
  modified_base 15: mod_base = OTHER; note = adenosine-3'-phosphate
  modified_base 16: mod_base = OTHER; note = 2'-O-methyluridine-3'-phosphate
  modified_base 17: mod_base = OTHER; note = adenosine-3'-phosphate
  modified_base 18: mod_base = OTHER; note = adenosine-3'-phosphate
  modified_base 19: mod_base = OTHER; note = 2'-O-methyluridine-3'-phosphate
  modified_base 20: mod_base = OTHER; note = 2'-deoxythymidine-3'-phosphorothioate
  misc_feature 1..19: note = RNA
  misc_feature 20..21: note = DNA
caaaataactcactataattt

SEQ ID NO: 461 - DNA, 21 bp, synthetic construct
  source 1..21: mol_type = other DNA
  modified_base 1: mod_base = OTHER; note = 2'-O-methylcytidine-3'-phosphate
  modified_base 2: mod_base = OTHER; note = 2'-O-methyluridine-3'-phosphate
  modified_base 3: mod_base = OTHER; note = 2'-O-methylcytidine-3'-phosphate
  modified_base 4: mod_base = OTHER; note = 2'-O-methyluridine-3'-phosphate
  modified_base 5: mod_base = OTHER; note = guanosine-3'-phosphate
  modified_base 6: mod_base = OTHER; note = guanosine-3'-phosphate
  modified_base 7: mod_base = OTHER; note = adenosine-3'-phosphate
  modified_base 8: mod_base = OTHER; note = adenosine-3'-phosphate
  modified_base 9: mod_base = OTHER; note = adenosine-3'-phosphate
  modified_base 10: mod_base = OTHER; note = 2'-O-methyluridine-3'-phosphate
  modified_base 11: mod_base = OTHER; note = 2'-O-methyluridine-3'-phosphate
  modified_base 12: mod_base = OTHER; note = guanosine-3'-phosphate
  modified_base 13: mod_base = OTHER; note = guanosine-3'-phosphate
  modified_base 14: mod_base = OTHER; note = 2'-O-methylcytidine-3'-phosphate
  modified_base 15: mod_base = OTHER; note = 2'-O-methylcytidine-3'-phosphate
  modified_base 16: mod_base = OTHER; note = 2'-O-methyluridine-3'-phosphate
  modified_base 17: mod_base = OTHER; note = 2'-O-methyluridine-3'-phosphate
  modified_base 18: mod_base = OTHER; note = 2'-O-methylcytidine-3'-phosphate
  modified_base 19: mod_base = OTHER; note = adenosine-3'-phosphate
  modified_base 20: mod_base = OTHER; note = 2'-deoxythymidine-3'-phosphorothioate
  misc_feature 1..19: note = RNA
  misc_feature 20..21: note = DNA
ctctggaaattggccttcatt

SEQ ID NO: 462 - DNA, 21 bp, synthetic construct
  source 1..21: mol_type = other DNA
  modified_base 1: mod_base = OTHER; note = guanosine-3'-phosphate
  modified_base 2: mod_base = OTHER; note = 2'-O-methylcytidine-3'-phosphate
  modified_base 3: mod_base = OTHER; note = adenosine-3'-phosphate
  modified_base 4: mod_base = OTHER; note = adenosine-3'-phosphate
  modified_base 5: mod_base = OTHER; note = guanosine-3'-phosphate
  modified_base 6: mod_base = OTHER; note = adenosine-3'-phosphate
  modified_base 7: mod_base = OTHER; note = 2'-O-methyluridine-3'-phosphate
  modified_base 8: mod_base = OTHER; note = adenosine-3'-phosphate
  modified_base 9: mod_base = OTHER; note = 2'-O-methyluridine-3'-phosphate
  modified_base 10: mod_base = OTHER; note = 2'-O-methyluridine-3'-phosphate
  modified_base 11: mod_base = OTHER; note = 2'-O-methyluridine-3'-phosphate
  modified_base 12: mod_base = OTHER; note = 2'-O-methyluridine-3'-phosphate
  modified_base 13: mod_base = OTHER; note = 2'-O-methyluridine-3'-phosphate
  modified_base 14: mod_base = OTHER; note = adenosine-3'-phosphate
  modified_base 15: mod_base = OTHER; note = 2'-O-methyluridine-3'-phosphate
  modified_base 16: mod_base = OTHER; note = adenosine-3'-phosphate
  modified_base 17: mod_base = OTHER; note = adenosine-3'-phosphate
  modified_base 18: mod_base = OTHER; note = 2'-O-methyluridine-3'-phosphate
  modified_base 19: mod_base = OTHER; note = adenosine-3'-phosphate
  modified_base 20: mod_base = OTHER; note = 2'-deoxythymidine-3'-phosphorothioate
  misc_feature 1..19: note = RNA
  misc_feature 20..21: note = DNA
gcaagatatttttataatatt

SEQ ID NO: 463 - DNA, 21 bp, synthetic construct
  source 1..21: mol_type = other DNA
  modified_base 1: mod_base = OTHER; note = adenosine-3'-phosphate
  modified_base 2: mod_base = OTHER; note = adenosine-3'-phosphate
  modified_base 3: mod_base = OTHER; note = 2'-O-methyluridine-3'-phosphate
  modified_base 4: mod_base = OTHER; note = guanosine-3'-phosphate
  modified_base 5: mod_base = OTHER; note = 2'-O-methyluridine-3'-phosphate
  modified_base 6: mod_base = OTHER; note = 2'-O-methyluridine-3'-phosphate
  modified_base 7: mod_base = OTHER; note = 2'-O-methyluridine-3'-phosphate
  modified_base 8: mod_base = OTHER; note = 2'-O-methyluridine-3'-phosphate
  modified_base 9: mod_base = OTHER; note = 2'-O-methyluridine-3'-phosphate
  modified_base 10: mod_base = OTHER; note = guanosine-3'-phosphate
  modified_base 11: mod_base = OTHER; note = 2'-O-methyluridine-3'-phosphate
  modified_base 12: mod_base = OTHER; note = 2'-O-methylcytidine-3'-phosphate
  modified_base 13: mod_base = OTHER; note = adenosine-3'-phosphate
  modified_base 14: mod_base = OTHER; note = adenosine-3'-phosphate
  modified_base 15: mod_base = OTHER; note = guanosine-3'-phosphate
  modified_base 16: mod_base = OTHER; note = 2'-O-methyluridine-3'-phosphate
  modified_base 17: mod_base = OTHER; note = adenosine-3'-phosphate
  modified_base 18: mod_base = OTHER; note = 2'-O-methylcytidine-3'-phosphate
  modified_base 19: mod_base = OTHER; note = adenosine-3'-phosphate
  modified_base 20: mod_base = OTHER; note = 2'-deoxythymidine-3'-phosphorothioate
  misc_feature 1..19: note = RNA
  misc_feature 20..21: note = DNA
aatgtttttgtcaagtacatt

SEQ ID NO: 464 - DNA, 21 bp, synthetic construct
  source 1..21: mol_type = other DNA
  modified_base 1: mod_base = OTHER; note = 2'-O-methyluridine-3'-phosphate
  modified_base 2: mod_base = OTHER; note = 2'-O-methyluridine-3'-phosphate
  modified_base 3: mod_base = OTHER; note = adenosine-3'-phosphate
  modified_base 4: mod_base = OTHER; note = adenosine-3'-phosphate
  modified_base 5: mod_base = OTHER; note = adenosine-3'-phosphate
  modified_base 6: mod_base = OTHER; note = 2'-O-methylcytidine-3'-phosphate
  modified_base 7: mod_base = OTHER; note = adenosine-3'-phosphate
  modified_base 8: mod_base = OTHER; note = adenosine-3'-phosphate
  modified_base 9: mod_base = OTHER; note = 2'-O-methylcytidine-3'-phosphate
  modified_base 10: mod_base = OTHER; note = adenosine-3'-phosphate
  modified_base 11: mod_base = OTHER; note = adenosine-3'-phosphate
  modified_base 12: mod_base = OTHER; note = guanosine-3'-phosphate
  modified_base 13: mod_base = OTHER; note = 2'-O-methyluridine-3'-phosphate
  modified_base 14: mod_base = OTHER; note = adenosine-3'-phosphate
  modified_base 15: mod_base = OTHER; note = 2'-O-methylcytidine-3'-phosphate
  modified_base 16: mod_base = OTHER; note = 2'-O-methylcytidine-3'-phosphate
  modified_base 17: mod_base = OTHER; note = 2'-O-methyluridine-3'-phosphate
  modified_base 18: mod_base = OTHER; note = 2'-O-methyluridine-3'-phosphate
  modified_base 19: mod_base = OTHER; note = 2'-O-methyluridine-3'-phosphate
  modified_base 20: mod_base = OTHER; note = 2'-deoxythymidine-3'-phosphorothioate
  misc_feature 1..19: note = RNA
  misc_feature 20..21: note = DNA
ttaaacaacaagtaccttttt

SEQ ID NO: 465 - DNA, 21 bp, synthetic construct
  source 1..21: mol_type = other DNA
  modified_base 1: mod_base = OTHER; note = 2'-O-methyluridine-3'-phosphate
  modified_base 2: mod_base = OTHER; note = 2'-O-methylcytidine-3'-phosphate
  modified_base 3: mod_base = OTHER; note = adenosine-3'-phosphate
  modified_base 4: mod_base = OTHER; note = guanosine-3'-phosphate
  modified_base 5: mod_base = OTHER; note = adenosine-3'-phosphate
  modified_base 6: mod_base = OTHER; note = adenosine-3'-phosphate
  modified_base 7: mod_base = OTHER; note = adenosine-3'-phosphate
  modified_base 8: mod_base = OTHER; note = guanosine-3'-phosphate
  modified_base 9: mod_base = OTHER; note = 2'-O-methyluridine-3'-phosphate
  modified_base 10: mod_base = OTHER; note = 2'-O-methylcytidine-3'-phosphate
  modified_base 11: mod_base = OTHER; note = 2'-O-methyluridine-3'-phosphate
  modified_base 12: mod_base = OTHER; note = guanosine-3'-phosphate
  modified_base 13: mod_base = OTHER; note = 2'-O-methyluridine-3'-phosphate
  modified_base 14: mod_base = OTHER; note = guanosine-3'-phosphate
  modified_base 15: mod_base = OTHER; note = adenosine-3'-phosphate
  modified_base 16: mod_base = OTHER; note = adenosine-3'-phosphate
  modified_base 17: mod_base = OTHER; note = guanosine-3'-phosphate
  modified_base 18: mod_base = OTHER; note = guanosine-3'-phosphate
  modified_base 19: mod_base = OTHER; note = adenosine-3'-phosphate
  modified_base 20: mod_base = OTHER; note = 2'-deoxythymidine-3'-phosphorothioate
  misc_feature 1..19: note = RNA
  misc_feature 20..21: note = DNA
tcagaaagtctgtgaaggatt

SEQ ID NO: 466 - DNA, 21 bp, synthetic construct
  source 1..21: mol_type = other DNA
  modified_base 1: mod_base = OTHER; note = adenosine-3'-phosphate
  modified_base 2: mod_base = OTHER; note = 2'-O-methylcytidine-3'-phosphate
  modified_base 3: mod_base = OTHER; note = 2'-O-methyluridine-3'-phosphate
  modified_base 4: mod_base = OTHER; note = guanosine-3'-phosphate
  modified_base 5: mod_base = OTHER; note = adenosine-3'-phosphate
  modified_base 6: mod_base = OTHER; note = adenosine-3'-phosphate
  modified_base 7: mod_base = OTHER; note = guanosine-3'-phosphate
  modified_base 8: mod_base = OTHER; note = 2'-O-methylcytidine-3'-phosphate
  modified_base 9: mod_base = OTHER; note = adenosine-3'-phosphate
  modified_base 10: mod_base = OTHER; note = 2'-O-methyluridine-3'-phosphate
  modified_base 11: mod_base = OTHER; note = 2'-O-methyluridine-3'-phosphate
  modified_base 12: mod_base = OTHER; note = 2'-O-methyluridine-3'-phosphate
  modified_base 13: mod_base = OTHER; note = guanosine-3'-phosphate
  modified_base 14: mod_base = OTHER; note = adenosine-3'-phosphate
  modified_base 15: mod_base = OTHER; note = 2'-O-methyluridine-3'-phosphate
  modified_base 16: mod_base = OTHER; note = guanosine-3'-phosphate
  modified_base 17: mod_base = OTHER; note = 2'-O-methylcytidine-3'-phosphate
  modified_base 18: mod_base = OTHER; note = adenosine-3'-phosphate
  modified_base 19: mod_base = OTHER; note = adenosine-3'-phosphate
  modified_base 20: mod_base = OTHER; note = 2'-deoxythymidine-3'-phosphorothioate
  misc_feature 1..19: note = RNA
  misc_feature 20..21: note = DNA
actgaagcatttgatgcaatt

SEQ ID NO: 467 - DNA, 21 bp, synthetic construct
  source 1..21: mol_type = other DNA
  modified_base 1: mod_base = OTHER; note = adenosine-3'-phosphate
  modified_base 2: mod_base = OTHER; note = guanosine-3'-phosphate
  modified_base 3: mod_base = OTHER; note = 2'-O-methyluridine-3'-phosphate
  modified_base 4: mod_base = OTHER; note = 2'-O-methyluridine-3'-phosphate
  modified_base 5: mod_base = OTHER; note = 2'-O-methylcytidine-3'-phosphate
  modified_base 6: mod_base = OTHER; note = 2'-O-methyluridine-3'-phosphate
  modified_base 7: mod_base = OTHER; note = guanosine-3'-phosphate
  modified_base 8: mod_base = OTHER; note = 2'-O-methyluridine-3'-phosphate
  modified_base 9: mod_base = OTHER; note = guanosine-3'-phosphate
  modified_base 10: mod_base = OTHER; note = 2'-O-methyluridine-3'-phosphate
  modified_base 11: mod_base = OTHER; note = 2'-O-methyluridine-3'-phosphate
  modified_base 12: mod_base = OTHER; note = adenosine-3'-phosphate
  modified_base 13: mod_base = OTHER; note = adenosine-3'-phosphate
  modified_base 14: mod_base = OTHER; note = adenosine-3'-phosphate
  modified_base 15: mod_base = OTHER; note = adenosine-3'-phosphate
  modified_base 16: mod_base = OTHER; note = 2'-O-methyluridine-3'-phosphate
  modified_base 17: mod_base = OTHER; note = guanosine-3'-phosphate
  modified_base 18: mod_base = OTHER; note = 2'-O-methyluridine-3'-phosphate
  modified_base 19: mod_base = OTHER; note = 2'-O-methylcytidine-3'-phosphate
  modified_base 20: mod_base = OTHER; note = 2'-deoxythymidine-3'-phosphorothioate
  misc_feature 1..19: note = RNA
  misc_feature 20..21: note = DNA
agttctgtgttaaaatgtctt

SEQ ID NO: 468 - DNA, 21 bp, synthetic construct
  source 1..21: mol_type = other DNA
  modified_base 1: mod_base = OTHER; note = adenosine-3'-phosphate
  modified_base 2: mod_base = OTHER; note = adenosine-3'-phosphate
  modified_base 3: mod_base = OTHER; note = adenosine-3'-phosphate
  modified_base 4: mod_base = OTHER; note = uridine-3'-phosphate
  modified_base 5: mod_base = OTHER; note = 2'-O-methylcytidine-3'-phosphate
  modified_base 6: mod_base = OTHER; note = adenosine-3'-phosphate
  modified_base 7: mod_base = OTHER; note = adenosine-3'-phosphate
  modified_base 8: mod_base = OTHER; note = guanosine-3'-phosphate
  modified_base 9: mod_base = OTHER; note = 2'-O-methyluridine-3'-phosphate
  modified_base 10: mod_base = OTHER; note = adenosine-3'-phosphate
  modified_base 11: mod_base = OTHER; note = adenosine-3'-phosphate
  modified_base 12: mod_base = OTHER; note = uridine-3'-phosphate
  modified_base 13: mod_base = OTHER; note = 2'-O-methyluridine-3'-phosphate
  modified_base 14: mod_base = OTHER; note = adenosine-3'-phosphate
  modified_base 15: mod_base = OTHER; note = 2'-O-methyluridine-3'-phosphate
  modified_base 16: mod_base = OTHER; note = adenosine-3'-phosphate
  modified_base 17: mod_base = OTHER; note = guanosine-3'-phosphate
  modified_base 18: mod_base = OTHER; note = uridine-3'-phosphate
  modified_base 19: mod_base = OTHER; note = guanosine-3'-phosphate
  modified_base 20: mod_base = OTHER; note = 2'-deoxythymidine-3'-phosphorothioate
  misc_feature 1..19: note = RNA
  misc_feature 20..21: note = DNA
aaatcaagtaattatagtgtt

SEQ ID NO: 469 - DNA, 21 bp, synthetic construct
  source 1..21: mol_type = other DNA
  modified_base 1: mod_base = OTHER; note = adenosine-3'-phosphate
  modified_base 2: mod_base = OTHER; note = adenosine-3'-phosphate
  modified_base 3: mod_base = OTHER; note = guanosine-3'-phosphate
  modified_base 4: mod_base = OTHER; note = 2'-O-methyluridine-3'-phosphate
  modified_base 5: mod_base = OTHER; note = adenosine-3'-phosphate
  modified_base 6: mod_base = OTHER; note = adenosine-3'-phosphate
  modified_base 7: mod_base = OTHER; note = uridine-3'-phosphate
  modified_base 8: mod_base = OTHER; note = 2'-O-methyluridine-3'-phosphate
  modified_base 9: mod_base = OTHER; note = adenosine-3'-phosphate
  modified_base 10: mod_base = OTHER; note = 2'-O-methyluridine-3'-phosphate
  modified_base 11: mod_base = OTHER; note = adenosine-3'-phosphate
  modified_base 12: mod_base = OTHER; note = guanosine-3'-phosphate
  modified_base 13: mod_base = OTHER; note = uridine-3'-phosphate
  modified_base 14: mod_base = OTHER; note = guanosine-3'-phosphate
  modified_base 15: mod_base = OTHER; note = adenosine-3'-phosphate
  modified_base 16: mod_base = OTHER; note = guanosine-3'-phosphate
  modified_base 17: mod_base = OTHER; note = uridine-3'-phosphate
  modified_base 18: mod_base = OTHER; note = 2'-O-methyluridine-3'-phosphate
  modified_base 19: mod_base = OTHER; note = adenosine-3'-phosphate
  modified_base 20: mod_base = OTHER; note = 2'-deoxythymidine-3'-phosphorothioate
  misc_feature 1..19: note = RNA
  misc_feature 20..21: note = DNA
aagtaattatagtgagttatt

SEQ ID NO: 470 - DNA, 21 bp, synthetic construct
  source 1..21: mol_type = other DNA
  modified_base 1: mod_base = OTHER; note = uridine-3'-phosphate
  modified_base 2: mod_base = OTHER; note = 2'-O-methyluridine-3'-phosphate
  modified_base 3: mod_base = OTHER; note = adenosine-3'-phosphate
  modified_base 4: mod_base = OTHER; note = 2'-O-methyluridine-3'-phosphate
  modified_base 5: mod_base = OTHER; note = adenosine-3'-phosphate
  modified_base 6: mod_base = OTHER; note = guanosine-3'-phosphate
  modified_base 7: mod_base = OTHER; note = uridine-3'-phosphate
  modified_base 8: mod_base = OTHER; note = guanosine-3'-phosphate
  modified_base 9: mod_base = OTHER; note = adenosine-3'-phosphate
  modified_base 10: mod_base = OTHER; note = guanosine-3'-phosphate
  modified_base 11: mod_base = OTHER; note = uridine-3'-phosphate
  modified_base 12: mod_base = OTHER; note = 2'-O-methyluridine-3'-phosphate
  modified_base 13: mod_base = OTHER; note = adenosine-3'-phosphate
  modified_base 14: mod_base = OTHER; note = uridine-3'-phosphate
  modified_base 15: mod_base = OTHER; note = uridine-3'-phosphate
  modified_base 16: mod_base = OTHER; note = uridine-3'-phosphate
  modified_base 17: mod_base = OTHER; note = uridine-3'-phosphate
  modified_base 18: mod_base = OTHER; note = guanosine-3'-phosphate
  modified_base 19: mod_base = OTHER; note = uridine-3'-phosphate
  modified_base 20: mod_base = OTHER; note = 2'-deoxythymidine-3'-phosphorothioate
  misc_feature 1..19: note = RNA
  misc_feature 20..21: note = DNA
ttatagtgagttattttgttt

SEQ ID NO: 471 - DNA, 21 bp, synthetic construct
  source 1..21: mol_type = other DNA
  modified_base 1: mod_base = OTHER; note = adenosine-3'-phosphate
  modified_base 2: mod_base = OTHER; note = adenosine-3'-phosphate
  modified_base 3: mod_base = OTHER; note = guanosine-3'-phosphate
  modified_base 4: mod_base = OTHER; note = guanosine-3'-phosphate
  modified_base 5: mod_base = OTHER; note = cytidine-3'-phosphate
  modified_base 6: mod_base = OTHER; note = 2'-O-methylcytidine-3'-phosphate
  modified_base 7: mod_base = OTHER; note = adenosine-3'-phosphate
  modified_base 8: mod_base = OTHER; note = adenosine-3'-phosphate
  modified_base 9: mod_base = OTHER; note = uridine-3'-phosphate
  modified_base 10: mod_base = OTHER; note = uridine-3'-phosphate
  modified_base 11: mod_base = OTHER; note = uridine-3'-phosphate
  modified_base 12: mod_base = OTHER; note = cytidine-3'-phosphate
  modified_base 13: mod_base = OTHER; note = 2'-O-methylcytidine-3'-phosphate
  modified_base 14: mod_base = OTHER; note = adenosine-3'-phosphate
  modified_base 15: mod_base = OTHER; note = guanosine-3'-phosphate
  modified_base 16: mod_base = OTHER; note = adenosine-3'-phosphate
  modified_base 17: mod_base = OTHER; note = guanosine-3'-phosphate
  modified_base 18: mod_base = OTHER; note = guanosine-3'-phosphate
  modified_base 19: mod_base = OTHER; note = adenosine-3'-phosphate
  modified_base 20: mod_base = OTHER; note = 2'-deoxythymidine-3'-phosphorothioate
  misc_feature 1..19: note = RNA
  misc_feature 20..21: note = DNA
aaggccaatttccagaggatt

SEQ ID NO: 472 - DNA, 21 bp, synthetic construct
  source 1..21: mol_type = other DNA
  modified_base 1: mod_base = OTHER; note = adenosine-3'-phosphate
  modified_base 2: mod_base = OTHER; note = uridine-3'-phosphate
  modified_base 3: mod_base = OTHER; note = 2'-O-methyluridine-3'-phosphate
  modified_base 4: mod_base = OTHER; note = adenosine-3'-phosphate
  modified_base 5: mod_base = OTHER; note = 2'-O-methyluridine-3'-phosphate
  modified_base 6: mod_base = OTHER; note = adenosine-3'-phosphate
  modified_base 7: mod_base = OTHER; note = guanosine-3'-phosphate
  modified_base 8: mod_base = OTHER; note = uridine-3'-phosphate
  modified_base 9: mod_base = OTHER; note = guanosine-3'-phosphate
  modified_base 10: mod_base = OTHER; note = adenosine-3'-phosphate
  modified_base 11: mod_base = OTHER; note = guanosine-3'-phosphate
  modified_base 12: mod_base = OTHER; note = uridine-3'-phosphate
  modified_base 13: mod_base = OTHER; note = 2'-O-methyluridine-3'-phosphate
  modified_base 14: mod_base = OTHER; note = adenosine-3'-phosphate
  modified_base 15: mod_base = OTHER; note = uridine-3'-phosphate
  modified_base 16: mod_base = OTHER; note = uridine-3'-phosphate
  modified_base 17: mod_base = OTHER; note = uridine-3'-phosphate
  modified_base 18: mod_base = OTHER; note = uridine-3'-phosphate
  modified_base 19: mod_base = OTHER; note = guanosine-3'-phosphate
  modified_base 20: mod_base = OTHER; note = 2'-deoxythymidine-3'-phosphorothioate
  misc_feature 1..19: note = RNA
  misc_feature 20..21: note = DNA
attatagtgagttattttgtt

SEQ ID NO: 473 - DNA, 21 bp, synthetic construct
  source 1..21: mol_type = other DNA
  modified_base 1: mod_base = OTHER; note = uridine-3'-phosphate
  modified_base 2: mod_base = OTHER; note = guanosine-3'-phosphate
  modified_base 3: mod_base = OTHER; note = adenosine-3'-phosphate
  modified_base 4: mod_base = OTHER; note = adenosine-3'-phosphate
  modified_base 5: mod_base = OTHER; note = guanosine-3'-phosphate
  modified_base 6: mod_base = OTHER; note = guanosine-3'-phosphate
  modified_base 7: mod_base = OTHER; note = cytidine-3'-phosphate
  modified_base 8: mod_base = OTHER; note = 2'-O-methylcytidine-3'-phosphate
  modified_base 9: mod_base = OTHER; note = adenosine-3'-phosphate
  modified_base 10: mod_base = OTHER; note = adenosine-3'-phosphate
  modified_base 11: mod_base = OTHER; note = uridine-3'-phosphate
  modified_base 12: mod_base = OTHER; note = uridine-3'-phosphate
  modified_base 13: mod_base = OTHER; note = uridine-3'-phosphate
  modified_base 14: mod_base = OTHER; note = cytidine-3'-phosphate
  modified_base 15: mod_base = OTHER; note = 2'-O-methylcytidine-3'-phosphate
  modified_base 16: mod_base = OTHER; note = adenosine-3'-phosphate
  modified_base 17: mod_base = OTHER; note = guanosine-3'-phosphate
  modified_base 18: mod_base = OTHER; note = adenosine-3'-phosphate
  modified_base 19: mod_base = OTHER; note = guanosine-3'-phosphate
  modified_base 20: mod_base = OTHER; note = 2'-deoxythymidine-3'-phosphorothioate
  misc_feature 1..19: note = RNA
  misc_feature 20..21: note = DNA
tgaaggccaatttccagagtt

SEQ ID NO: 474 - DNA, 21 bp, synthetic construct
  source 1..21: mol_type = other DNA
  modified_base 1: mod_base = OTHER; note = 2'-O-methyluridine-3'-phosphate
  modified_base 2: mod_base = OTHER; note = adenosine-3'-phosphate
  modified_base 3: mod_base = OTHER; note = uridine-3'-phosphate
  modified_base 4: mod_base = OTHER; note = 2'-O-methyluridine-3'-phosphate
  modified_base 5: mod_base = OTHER; note = adenosine-3'-phosphate
  modified_base 6: mod_base = OTHER; note = 2'-O-methyluridine-3'-phosphate
  modified_base 7: mod_base = OTHER; note = adenosine-3'-phosphate
  modified_base 8: mod_base = OTHER; note = adenosine-3'-phosphate
  modified_base 9: mod_base = OTHER; note = adenosine-3'-phosphate
  modified_base 10: mod_base = OTHER; note = adenosine-3'-phosphate
  modified_base 11: mod_base = OTHER; note = adenosine-3'-phosphate
  modified_base 12: mod_base = OTHER; note = 2'-O-methyluridine-3'-phosphate
  modified_base 13: mod_base = OTHER; note = adenosine-3'-phosphate
  modified_base 14: mod_base = OTHER; note = uridine-3'-phosphate
  modified_base 15: mod_base = OTHER; note = cytidine-3'-phosphate
  modified_base 16: mod_base = OTHER; note = uridine-3'-phosphate
  modified_base 17: mod_base = OTHER; note = uridine-3'-phosphate
  modified_base 18: mod_base = OTHER; note = guanosine-3'-phosphate
  modified_base 19: mod_base = OTHER; note = cytidine-3'-phosphate
  modified_base 20: mod_base = OTHER; note = 2'-deoxythymidine-3'-phosphorothioate
  misc_feature 1..19: note = RNA
  misc_feature 20..21: note = DNA
tattataaaaatatcttgctt

SEQ ID NO: 475 - DNA, 21 bp, synthetic construct
  source 1..21: mol_type = other DNA
  modified_base 1: mod_base = OTHER; note = uridine-3'-phosphate
  modified_base 2: mod_base = OTHER; note = guanosine-3'-phosphate
  modified_base 3: mod_base = OTHER; note = 2'-O-methyluridine-3'-phosphate
  modified_base 4: mod_base = OTHER; note = adenosine-3'-phosphate
  modified_base 5: mod_base = OTHER; note = cytidine-3'-phosphate
  modified_base 6: mod_base = OTHER; note = uridine-3'-phosphate
  modified_base 7: mod_base = OTHER; note = uridine-3'-phosphate
  modified_base 8: mod_base = OTHER; note = guanosine-3'-phosphate
  modified_base 9: mod_base = OTHER; note = adenosine-3'-phosphate
  modified_base 10: mod_base = OTHER; note = 2'-O-methylcytidine-3'-phosphate
  modified_base 11: mod_base = OTHER; note = adenosine-3'-phosphate
  modified_base 12: mod_base = OTHER; note = adenosine-3'-phosphate
  modified_base 13: mod_base = OTHER; note = adenosine-3'-phosphate
  modified_base 14: mod_base = OTHER; note = adenosine-3'-phosphate
  modified_base 15: mod_base = OTHER; note = adenosine-3'-phosphate
  modified_base 16: mod_base = OTHER; note = 2'-O-methylcytidine-3'-phosphate
  modified_base 17: mod_base = OTHER; note = adenosine-3'-phosphate
  modified_base 18: mod_base = OTHER; note = uridine-3'-phosphate
  modified_base 19: mod_base = OTHER; note = uridine-3'-phosphate
  modified_base 20: mod_base = OTHER; note = 2'-deoxythymidine-3'-phosphorothioate
  misc_feature 1..19: note = RNA
  misc_feature 20..21: note = DNA
tgtacttgacaaaaacatttt

SEQ ID NO: 476 - DNA, 21 bp, synthetic construct
  source 1..21: mol_type = other DNA
  modified_base 1: mod_base = OTHER; note = adenosine-3'-phosphate
  modified_base 2: mod_base = OTHER; note = adenosine-3'-phosphate
  modified_base 3: mod_base = OTHER; note = adenosine-3'-phosphate
  modified_base 4: mod_base = OTHER; note = guanosine-3'-phosphate
  modified_base 5: mod_base = OTHER; note = guanosine-3'-phosphate
  modified_base 6: mod_base = OTHER; note = 2'-O-methyluridine-3'-phosphate
  modified_base 7: mod_base = OTHER; note = adenosine-3'-phosphate
  modified_base 8: mod_base = OTHER; note = cytidine-3'-phosphate
  modified_base 9: mod_base = OTHER; note = uridine-3'-phosphate
  modified_base 10: mod_base = OTHER; note = uridine-3'-phosphate
  modified_base 11: mod_base = OTHER; note = guanosine-3'-phosphate
  modified_base 12: mod_base = OTHER; note = uridine-3'-phosphate
  modified_base 13: mod_base = OTHER; note = uridine-3'-phosphate
  modified_base 14: mod_base = OTHER; note = guanosine-3'-phosphate
  modified_base 15: mod_base = OTHER; note = uridine-3'-phosphate
  modified_base 16: mod_base = OTHER; note = uridine-3'-phosphate
  modified_base 17: mod_base = OTHER; note = 2'-O-methyluridine-3'-phosphate
  modified_base 18: mod_base = OTHER; note = adenosine-3'-phosphate
  modified_base 19: mod_base = OTHER; note = adenosine-3'-phosphate
  modified_base 20: mod_base = OTHER; note = 2'-deoxythymidine-3'-phosphorothioate
  misc_feature 1..19: note = RNA
  misc_feature 20..21: note = DNA
aaaggtacttgttgtttaatt

SEQ ID NO: 477 - DNA, 21 bp, synthetic construct
  source 1..21: mol_type = other DNA
  modified_base 1: mod_base = OTHER; note = uridine-3'-phosphate
  modified_base 2: mod_base = OTHER; note = cytidine-3'-phosphate
  modified_base 3: mod_base = OTHER; note = cytidine-3'-phosphate
  modified_base 4: mod_base = OTHER; note = uridine-3'-phosphate
  modified_base 5: mod_base = OTHER; note = uridine-3'-phosphate
  modified_base 6: mod_base = OTHER; note = 2'-O-methylcytidine-3'-phosphate
  modified_base 7: mod_base = OTHER; note = adenosine-3'-phosphate
  modified_base 8: mod_base = OTHER; note = 2'-O-methylcytidine-3'-phosphate
  modified_base 9: mod_base = OTHER; note = adenosine-3'-phosphate
  modified_base 10: mod_base = OTHER; note = guanosine-3'-phosphate
  modified_base 11: mod_base = OTHER; note = adenosine-3'-phosphate
  modified_base 12: mod_base = OTHER; note = cytidine-3'-phosphate
  modified_base 13: mod_base = OTHER; note = uridine-3'-phosphate
  modified_base 14: mod_base = OTHER; note = uridine-3'-phosphate
  modified_base 15: mod_base = OTHER; note = uridine-3'-phosphate
  modified_base 16: mod_base = OTHER; note = cytidine-3'-phosphate
  modified_base 17: mod_base = OTHER; note = uridine-3'-phosphate
  modified_base 18: mod_base = OTHER; note = guanosine-3'-phosphate
  modified_base 19: mod_base = OTHER; note = adenosine-3'-phosphate
  modified_base 20: mod_base = OTHER; note = 2'-deoxythymidine-3'-phosphorothioate
  misc_feature 1..19: note = RNA
  misc_feature 20..21: note = DNA
tccttcacagactttctgatt

SEQ ID NO: 478 - DNA, 21 bp, synthetic construct
  source 1..21: mol_type = other DNA
  modified_base 1: mod_base = OTHER; note = uridine-3'-phosphate
  modified_base 2: mod_base = OTHER; note = uridine-3'-phosphate
  modified_base 3: mod_base = OTHER; note = guanosine-3'-phosphate
  modified_base 4: mod_base = OTHER; note = 2'-O-methylcytidine-3'-phosphate
  modified_base 5: mod_base = OTHER; note = adenosine-3'-phosphate
  modified_base 6: mod_base = OTHER; note = uridine-3'-phosphate
  modified_base 7: mod_base = OTHER; note = 2'-O-methylcytidine-3'-phosphate
  modified_base 8: mod_base = OTHER; note = adenosine-3'-phosphate
  modified_base 9: mod_base = OTHER; note = adenosine-3'-phosphate
  modified_base 10: mod_base = OTHER; note = adenosine-3'-phosphate
  modified_base 11: mod_base = OTHER; note = uridine-3'-phosphate
  modified_base 12: mod_base = OTHER; note = guanosine-3'-phosphate
  modified_base 13: mod_base = OTHER; note = cytidine-3'-phosphate
  modified_base 14: mod_base = OTHER; note = uridine-3'-phosphate
  modified_base 15: mod_base = OTHER; note = uridine-3'-phosphate
  modified_base 16: mod_base = OTHER; note = 2'-O-methylcytidine-3'-phosphate
  modified_base 17: mod_base = OTHER; note = adenosine-3'-phosphate
  modified_base 18: mod_base = OTHER; note = guanosine-3'-phosphate
  modified_base 19: mod_base = OTHER; note = uridine-3'-phosphate
  modified_base 20: mod_base = OTHER; note = 2'-deoxythymidine-3'-phosphorothioate
  misc_feature 1..19: note = RNA
  misc_feature 20..21: note = DNA
ttgcatcaaatgcttcagttt

SEQ ID NO: 479 - DNA, 21 bp, synthetic construct
  source 1..21: mol_type = other DNA
  modified_base 1: mod_base = OTHER; note = guanosine-3'-phosphate
  modified_base 2: mod_base = OTHER; note = adenosine-3'-phosphate
  modified_base 3: mod_base = OTHER; note = 2'-O-methylcytidine-3'-phosphate
  modified_base 4: mod_base = OTHER; note = adenosine-3'-phosphate
  modified_base 5: mod_base = OTHER; note = uridine-3'-phosphate
  modified_base 6: mod_base = OTHER; note = uridine-3'-phosphate
  modified_base 7: mod_base = OTHER; note = uridine-3'-phosphate
  modified_base 8: mod_base = OTHER; note = 2'-O-methyluridine-3'-phosphate
  modified_base 9: mod_base = OTHER; note = adenosine-3'-phosphate
  modified_base 10: mod_base = OTHER; note = adenosine-3'-phosphate
  modified_base 11: mod_base = OTHER; note = 2'-O-methylcytidine-3'-phosphate
  modified_base 12: mod_base = OTHER; note = adenosine-3'-phosphate
  modified_base 13: mod_base = OTHER; note = 2'-O-methylcytidine-3'-phosphate
  modified_base 14: mod_base = OTHER; note = adenosine-3'-phosphate
  modified_base 15: mod_base = OTHER; note = guanosine-3'-phosphate
  modified_base 16: mod_base = OTHER; note = adenosine-3'-phosphate
  modified_base 17: mod_base = OTHER; note = adenosine-3'-phosphate
  modified_base 18: mod_base = OTHER; note = cytidine-3'-phosphate
  modified_base 19: mod_base = OTHER; note = uridine-3'-phosphate
  modified_base 20: mod_base = OTHER; note = 2'-deoxythymidine-3'-phosphorothioate
  misc_feature 1..19: note = RNA
  misc_feature 20..21: note = DNA
gacattttaacacagaacttt

SEQ ID NO: 480 - DNA, 21 bp, synthetic construct
  source 1..21: mol_type = other DNA
  modified_base 1: mod_base = OTHER; note = uridine-3'-phosphate
  modified_base 2: mod_base = OTHER; note = cytidine-3'-phosphate
  modified_base 3: mod_base = OTHER; note = cytidine-3'-phosphate
  modified_base 4: mod_base = OTHER; note = uridine-3'-phosphate
  modified_base 5: mod_base = OTHER; note = uridine-3'-phosphate
  modified_base 6: mod_base = OTHER; note = uridine-3'-phosphate
  modified_base 7: mod_base = OTHER; note = 2'-O-methyluridine-3'-phosphate
  modified_base 8: mod_base = OTHER; note = adenosine-3'-phosphate
  modified_base 9: mod_base = OTHER; note = 2'-O-methylcytidine-3'-phosphate
  modified_base 10: mod_base = OTHER; note = adenosine-3'-phosphate
  modified_base 11: mod_base = OTHER; note = cytidine-3'-phosphate
  modified_base 12: mod_base = OTHER; note = uridine-3'-phosphate
  modified_base 13: mod_base = OTHER; note = 2'-O-methylcytidine-3'-phosphate
  modified_base 14: mod_base = OTHER; note = adenosine-3'-phosphate
  modified_base 15: mod_base = OTHER; note = adenosine-3'-phosphate
  modified_base 16: mod_base = OTHER; note = adenosine-3'-phosphate
  modified_base 17: mod_base = OTHER; note = adenosine-3'-phosphate
  modified_base 18: mod_base = OTHER; note = uridine-3'-phosphate
  modified_base 19: mod_base = OTHER; note = cytidine-3'-phosphate
  modified_base 20: mod_base = OTHER; note = 2'-deoxythymidine-3'-phosphorothioate
  misc_feature 1..19: note = RNA
  misc_feature 20..21: note = DNA
tccttttacactcaaaatctt

SEQ ID NO: 481 - DNA, 21 bp, synthetic construct
  source 1..21: mol_type = other DNA
  modified_base 1: mod_base = OTHER; note = uridine-3'-phosphate
  modified_base 2: mod_base = OTHER; note = uridine-3'-phosphate
  modified_base 3: mod_base = OTHER; note = cytidine-3'-phosphate
  modified_base 4: mod_base = OTHER; note = uridine-3'-phosphate
  modified_base 5: mod_base = OTHER; note = uridine-3'-phosphate
  modified_base 6: mod_base = OTHER; note = 2'-O-methyluridine-3'-phosphate
  modified_base 7: mod_base = OTHER; note = adenosine-3'-phosphate
  modified_base 8: mod_base = OTHER; note = 2'-O-methylcytidine-3'-phosphate
  modified_base 9: mod_base = OTHER; note = adenosine-3'-phosphate
  modified_base 10: mod_base = OTHER; note = adenosine-3'-phosphate
  modified_base 11: mod_base = OTHER; note = guanosine-3'-phosphate
  modified_base 12: mod_base = OTHER; note = guanosine-3'-phosphate
  modified_base 13: mod_base = OTHER; note = uridine-3'-phosphate
  modified_base 14: mod_base = OTHER; note = uridine-3'-phosphate
  modified_base 15: mod_base = OTHER; note = 2'-O-methylcytidine-3'-phosphate
  modified_base 16: mod_base = OTHER; note = adenosine-3'-phosphate
  modified_base 17: mod_base = OTHER; note = uridine-3'-phosphate
  modified_base 18: mod_base = OTHER; note = 2'-O-methylcytidine-3'-phosphate
  modified_base 19: mod_base = OTHER; note = adenosine-3'-phosphate
  modified_base 20: mod_base = OTHER; note = 2'-deoxythymidine-3'-phosphorothioate
  misc_feature 1..19: note = RNA
  misc_feature 20..21: note = DNA
ttctttacaaggttcatcatt

SEQ ID NO: 482 - DNA, 21 bp, synthetic construct
  source 1..21: mol_type = other DNA
  modified_base 1: mod_base = OTHER; note = adenosine-3'-phosphate
  modified_base 2: mod_base = OTHER; note = adenosine-3'-phosphate
  modified_base 3: mod_base = OTHER; note = uridine-3'-phosphate
  modified_base 4: mod_base = OTHER; note = guanosine-3'-phosphate
  modified_base 5: mod_base = OTHER; note = adenosine-3'-phosphate
  modified_base 6: mod_base = OTHER; note = adenosine-3'-phosphate
  modified_base 7: mod_base = OTHER; note = adenosine-3'-phosphate
  modified_base 8: mod_base = OTHER; note = adenosine-3'-phosphate
  modified_base 9: mod_base = OTHER; note = adenosine-3'-phosphate
  modified_base 10: mod_base = OTHER; note = uridine-3'-phosphate
  modified_base 11: mod_base = OTHER; note = guanosine-3'-phosphate
  modified_base 12: mod_base = OTHER; note = uridine-3'-phosphate
  modified_base 13: mod_base = OTHER; note = uridine-3'-phosphate
  modified_base 14: mod_base = OTHER; note = cytidine-3'-phosphate
  modified_base 15: mod_base = OTHER; note = 2'-O-methylcytidine-3'-phosphate
  modified_base 16: mod_base = OTHER; note = adenosine-3'-phosphate
  modified_base 17: mod_base = OTHER; note = adenosine-3'-phosphate
  modified_base 18: mod_base = OTHER; note = uridine-3'-phosphate
  modified_base 19: mod_base = OTHER; note = guanosine-3'-phosphate
  modified_base 20: mod_base = OTHER; note = 2'-deoxythymidine-3'-phosphorothioate
  misc_feature 1..19: note = RNA
  misc_feature 20..21: note = DNA
aatgaaaaatgttccaatgtt

SEQ ID NO: 483 - DNA, 21 bp, synthetic construct
  source 1..21: mol_type = other DNA
  modified_base 1: mod_base = OTHER; note = adenosine-3'-phosphate
  modified_base 2: mod_base = OTHER; note = adenosine-3'-phosphate
  modified_base 3: mod_base = OTHER; note = 2'-O-methyluridine-3'-phosphate
  modified_base 4: mod_base = OTHER; note = adenosine-3'-phosphate
  modified_base 5: mod_base = OTHER; note = adenosine-3'-phosphate
  modified_base 6: mod_base = OTHER; note = cytidine-3'-phosphate
  modified_base 7: mod_base = OTHER; note = uridine-3'-phosphate
  modified_base 8: mod_base = OTHER; note = cytidine-3'-phosphate
  modified_base 9: mod_base = OTHER; note = cytidine-3'-phosphate
  modified_base 10: mod_base = OTHER; note = guanosine-3'-phosphate
  modified_base 11: mod_base = OTHER; note = adenosine-3'-phosphate
  modified_base 12: mod_base = OTHER; note = adenosine-3'-phosphate
  modified_base 13: mod_base = OTHER; note = uridine-3'-phosphate
  modified_base 14: mod_base = OTHER; note = uridine-3'-phosphate
  modified_base 15: mod_base = OTHER; note = uridine-3'-phosphate
  modified_base 16: mod_base = OTHER; note = cytidine-3'-phosphate
  modified_base 17: mod_base = OTHER; note = uridine-3'-phosphate
  modified_base 18: mod_base = OTHER; note = guanosine-3'-phosphate
  modified_base 19: mod_base = OTHER; note = guanosine-3'-phosphate
  modified_base 20: mod_base = OTHER; note = 2'-deoxythymidine-3'-phosphorothioate
  misc_feature 1..19: note = RNA
  misc_feature 20..21: note = DNA
aataactccgaatttctggtt

SEQ ID NO: 484 - DNA, 21 bp, synthetic construct
  source 1..21: mol_type = other DNA
  modified_base 1: mod_base = OTHER; note = guanosine-3'-phosphate
  modified_base 2: mod_base = OTHER; note = uridine-3'-phosphate
  modified_base 3: mod_base = OTHER; note = guanosine-3'-phosphate
  modified_base 4: mod_base = OTHER; note = adenosine-3'-phosphate
  modified_base 5: mod_base = OTHER; note = guanosine-3'-phosphate
  modified_base 6: mod_base = OTHER; note = uridine-3'-phosphate
  modified_base 7: mod_base = OTHER; note = uridine-3'-phosphate
  modified_base 8: mod_base = OTHER; note = uridine-3'-phosphate
  modified_base 9: mod_base = OTHER; note = 2'-O-methyluridine-3'-phosphate
  modified_base 10: mod_base = OTHER; note = adenosine-3'-phosphate
  modified_base 11: mod_base = OTHER; note = uridine-3'-phosphate
  modified_base 12: mod_base = OTHER; note = cytidine-3'-phosphate
  modified_base 13: mod_base = OTHER; note = uridine-3'-phosphate
  modified_base 14: mod_base = OTHER; note = cytidine-3'-phosphate
  modified_base 15: mod_base = OTHER; note = cytidine-3'-phosphate
  modified_base 16: mod_base = OTHER; note = 2'-O-methylcytidine-3'-phosphate
  modified_base 17: mod_base = OTHER; note = adenosine-3'-phosphate
  modified_base 18: mod_base = OTHER; note = guanosine-3'-phosphate
  modified_base 19: mod_base = OTHER; note = guanosine-3'-phosphate
  modified_base 20: mod_base = OTHER; note = 2'-deoxythymidine-3'-phosphorothioate
  misc_feature 1..19: note = RNA
  misc_feature 20..21: note = DNA
gtgagttttatctcccaggtt

SEQ ID NO: 485 - DNA, 21 bp, synthetic construct
  source 1..21: mol_type = other DNA
  modified_base 1: mod_base = OTHER; note = uridine-3'-phosphate
  modified_base 2: mod_base = OTHER; note = uridine-3'-phosphate
  modified_base 3: mod_base = OTHER; note = 2'-O-methyluridine-3'-phosphate
  modified_base 4: mod_base = OTHER; note = adenosine-3'-phosphate
  modified_base 5: mod_base = OTHER; note = 2'-O-methylcytidine-3'-phosphate
  modified_base 6: mod_base = OTHER; note = adenosine-3'-phosphate
  modified_base 7: mod_base = OTHER; note = adenosine-3'-phosphate
  modified_base 8: mod_base = OTHER; note = guanosine-3'-phosphate
  modified_base 9: mod_base = OTHER; note = guanosine-3'-phosphate
  modified_base 10: mod_base = OTHER; note = uridine-3'-phosphate
  modified_base 11: mod_base = OTHER; note = uridine-3'-phosphate
  modified_base 12: mod_base = OTHER; note = 2'-O-methylcytidine-3'-phosphate
  modified_base 13: mod_base = OTHER; note = adenosine-3'-phosphate
  modified_base 14: mod_base = OTHER; note = uridine-3'-phosphate
  modified_base 15: mod_base = OTHER; note = 2'-O-methylcytidine-3'-phosphate
  modified_base 16: mod_base = OTHER; note = adenosine-3'-phosphate
  modified_base 17: mod_base = OTHER; note = uridine-3'-phosphate
  modified_base 18: mod_base = OTHER; note = uridine-3'-phosphate
  modified_base 19: mod_base = OTHER; note = uridine-3'-phosphate
  modified_base 20: mod_base = OTHER; note = 2'-deoxythymidine-3'-phosphorothioate
  misc_feature 1..19: note = RNA
  misc_feature 20..21: note = DNA
tttacaaggttcatcattttt

SEQ ID NO: 486 - DNA, 21 bp, synthetic construct
  source 1..21: mol_type = other DNA
  modified_base 1: mod_base = OTHER; note = adenosine-3'-phosphate
  modified_base 2: mod_base = OTHER; note = uridine-3'-phosphate
  modified_base 3: mod_base = OTHER; note = 2'-O-methylcytidine-3'-phosphate
  modified_base 4: mod_base = OTHER; note = adenosine-3'-phosphate
  modified_base 5: mod_base = OTHER; note = adenosine-3'-phosphate
  modified_base 6: mod_base = OTHER; note = adenosine-3'-phosphate
  modified_base 7: mod_base = OTHER; note = uridine-3'-phosphate
  modified_base 8: mod_base = OTHER; note = guanosine-3'-phosphate
  modified_base 9: mod_base = OTHER; note = uridine-3'-phosphate
  modified_base 10: mod_base = OTHER; note = guanosine-3'-phosphate
  modified_base 11: mod_base = OTHER; note = adenosine-3'-phosphate
  modified_base 12: mod_base = OTHER; note = cytidine-3'-phosphate
  modified_base 13: mod_base = OTHER; note = uridine-3'-phosphate
  modified_base 14: mod_base = OTHER; note = uridine-3'-phosphate
  modified_base 15: mod_base = OTHER; note = guanosine-3'-phosphate
  modified_base 16: mod_base = OTHER; note = adenosine-3'-phosphate
  modified_base 17: mod_base = OTHER; note = guanosine-3'-phosphate
  modified_base 18: mod_base = OTHER; note = 2'-O-methylcytidine-3'-phosphate
  modified_base 19: mod_base = OTHER; note = adenosine-3'-phosphate
  modified_base 20: mod_base = OTHER; note = 2'-deoxythymidine-3'-phosphorothioate
  misc_feature 1..19: note = RNA
  misc_feature 20..21: note = DNA
atcaaatgtgacttgagcatt

SEQ ID NO: 487 - DNA, 21 bp, synthetic construct
  source 1..21: mol_type = other DNA
  modified_base 1: mod_base = OTHER; note = uridine-3'-phosphate
  modified_base 2: mod_base = OTHER; note = uridine-3'-phosphate
  modified_base 3: mod_base = OTHER; note = 2'-O-methyluridine-3'-phosphate
  modified_base 4: mod_base = OTHER; note = adenosine-3'-phosphate
  modified_base 5: mod_base = OTHER; note = 2'-O-methyluridine-3'-phosphate
  modified_base 6: mod_base = OTHER; note = adenosine-3'-phosphate
  modified_base 7: mod_base = OTHER; note = adenosine-3'-phosphate
  modified_base 8: mod_base = OTHER; note = guanosine-3'-phosphate
  modified_base 9: mod_base = OTHER; note = 2'-O-methylcytidine-3'-phosphate
  modified_base 10: mod_base = OTHER; note = adenosine-3'-phosphate
  modified_base 11: mod_base = OTHER; note = 2'-O-methyluridine-3'-phosphate
  modified_base 12: mod_base = OTHER; note = adenosine-3'-phosphate
  modified_base 13: mod_base = OTHER; note = uridine-3'-phosphate
  modified_base 14: mod_base = OTHER; note = guanosine-3'-phosphate
  modified_base 15: mod_base = OTHER; note = 2'-O-methylcytidine-3'-phosphate
  modified_base 16: mod_base = OTHER; note = adenosine-3'-phosphate
  modified_base 17: mod_base = OTHER; note = adenosine-3'-phosphate
  modified_base 18: mod_base = OTHER; note = uridine-3'-phosphate
  modified_base 19: mod_base = OTHER; note = cytidine-3'-phosphate
  modified_base 20: mod_base = OTHER; note = 2'-deoxythymidine-3'-phosphorothioate
  misc_feature 1..19: note = RNA
  misc_feature 20..21: note = DNA
tttataagcatatgcaatctt

SEQ ID NO: 488 - DNA, 21 bp, synthetic construct
  source 1..21: mol_type = other DNA
  modified_base 1: mod_base = OTHER; note = 2'-O-methyluridine-3'-phosphate
  modified_base 2: mod_base = OTHER; note = adenosine-3'-phosphate
  modified_base 3: mod_base = OTHER; note = adenosine-3'-phosphate
  modified_base 4: mod_base = OTHER; note = adenosine-3'-phosphate
  modified_base 5: mod_base = OTHER; note = uridine-3'-phosphate
  modified_base 6: mod_base = OTHER; note = uridine-3'-phosphate
  modified_base 7: mod_base = OTHER; note = uridine-3'-phosphate
  modified_base 8: mod_base = OTHER; note = uridine-3'-phosphate
  modified_base 9: mod_base = OTHER; note = uridine-3'-phosphate
  modified_base 10: mod_base = OTHER; note = 2'-O-methyluridine-3'-phosphate
  modified_base 11: mod_base = OTHER; note = adenosine-3'-phosphate
  modified_base 12: mod_base = OTHER; note = uridine-3'-phosphate
  modified_base 13: mod_base = OTHER; note = 2'-O-methylcytidine-3'-phosphate
  modified_base 14: mod_base = OTHER; note = adenosine-3'-phosphate
  modified_base 15: mod_base = OTHER; note = guanosine-3'-phosphate
  modified_base 16: mod_base = OTHER; note = guanosine-3'-phosphate
  modified_base 17: mod_base = OTHER; note = adenosine-3'-phosphate
  modified_base 18: mod_base = OTHER; note = 2'-O-methyluridine-3'-phosphate
  modified_base 19: mod_base = OTHER; note = adenosine-3'-phosphate
  modified_base 20: mod_base = OTHER; note = 2'-deoxythymidine-3'-phosphorothioate
  misc_feature 1..19: note = RNA
  misc_feature 20..21: note = DNA
taaattttttatcaggatatt

SEQ ID NO: 489 - DNA, 21 bp, synthetic construct
  source 1..21: mol_type = other DNA
  modified_base 1: mod_base = OTHER; note = adenosine-3'-phosphate
  modified_base 2: mod_base = OTHER; note = adenosine-3'-phosphate
  modified_base 3: mod_base = OTHER; note = 2'-O-methyluridine-3'-phosphate
  modified_base 4: mod_base = OTHER; note = adenosine-3'-phosphate
  modified_base 5: mod_base = OTHER; note = adenosine-3'-phosphate
  modified_base 6: mod_base = OTHER; note = adenosine-3'-phosphate
  modified_base 7: mod_base = OTHER; note = adenosine-3'-phosphate
  modified_base 8: mod_base = OTHER; note = guanosine-3'-phosphate
  modified_base 9: mod_base = OTHER; note = cytidine-3'-phosphate
  modified_base 10: mod_base = OTHER; note = uridine-3'-phosphate
  modified_base 11: mod_base = OTHER; note = guanosine-3'-phosphate
  modified_base 12: mod_base = OTHER; note = 2'-O-methylcytidine-3'-phosphate
  modified_base 13: mod_base = OTHER; note = adenosine-3'-phosphate
  modified_base 14: mod_base = OTHER; note = adenosine-3'-phosphate
  modified_base 15: mod_base = OTHER; note = adenosine-3'-phosphate
  modified_base 16: mod_base = OTHER; note = cytidine-3'-phosphate
  modified_base 17: mod_base = OTHER; note = uridine-3'-phosphate
  modified_base 18: mod_base = OTHER; note = uridine-3'-phosphate
  modified_base 19: mod_base = OTHER; note = cytidine-3'-phosphate
  modified_base 20: mod_base = OTHER; note = 2'-deoxythymidine-3'-phosphorothioate
  misc_feature 1..19: note = RNA
  misc_feature 20..21: note = DNA
aataaaagctgcaaacttctt

SEQ ID NO: 490 - DNA, 21 bp, synthetic construct
  source 1..21: mol_type = other DNA
  modified_base 1: mod_base = OTHER; note = uridine-3'-phosphate
  modified_base 2: mod_base = OTHER; note = cytidine-3'-phosphate
  modified_base 3: mod_base = OTHER; note = 2'-O-methylcytidine-3'-phosphate
  modified_base 4: mod_base = OTHER; note = adenosine-3'-phosphate
  modified_base 5: mod_base = OTHER; note = adenosine-3'-phosphate
  modified_base 6: mod_base = OTHER; note = 2'-O-methyluridine-3'-phosphate
  modified_base 7: mod_base = OTHER; note = adenosine-3'-phosphate
  modified_base 8: mod_base = OTHER; note = uridine-3'-phosphate
  modified_base 9: mod_base = OTHER; note = guanosine-3'-phosphate
  modified_base 10: mod_base = OTHER; note = adenosine-3'-phosphate
  modified_base 11: mod_base = OTHER; note = uridine-3'-phosphate
  modified_base 12: mod_base = OTHER; note = 2'-O-methylcytidine-3'-phosphate
  modified_base 13: mod_base = OTHER; note = adenosine-3'-phosphate
  modified_base 14: mod_base = OTHER; note = adenosine-3'-phosphate
  modified_base 15: mod_base = OTHER; note = uridine-3'-phosphate
  modified_base 16: mod_base = OTHER; note = uridine-3'-phosphate
  modified_base 17: mod_base = OTHER; note = uridine-3'-phosphate
  modified_base 18: mod_base = OTHER; note = cytidine-3'-phosphate
  modified_base 19: mod_base = OTHER; note = uridine-3'-phosphate
  modified_base 20: mod_base = OTHER; note = 2'-deoxythymidine-3'-phosphorothioate
  misc_feature 1..19: note = RNA
  misc_feature 20..21: note = DNA
tccaatatgatcaatttcttt

SEQ ID NO: 491 - DNA, 21 bp, synthetic construct
  source 1..21: mol_type = other DNA
  modified_base 1: mod_base = OTHER; note = adenosine-3'-phosphate
  modified_base 2: mod_base = OTHER; note = adenosine-3'-phosphate
  modified_base 3: mod_base = OTHER; note = cytidine-3'-phosphate
  modified_base 4: mod_base = OTHER; note = 2'-O-methyluridine-3'-phosphate
  modified_base 5: mod_base = OTHER; note = adenosine-3'-phosphate
  modified_base 6: mod_base = OTHER; note = adenosine-3'-phosphate
  modified_base 7: mod_base = OTHER; note = adenosine-3'-phosphate
  modified_base 8: mod_base = OTHER; note = uridine-3'-phosphate
  modified_base 9: mod_base = OTHER; note = uridine-3'-phosphate
  modified_base 10: mod_base = OTHER; note = uridine-3'-phosphate
  modified_base 11: mod_base = OTHER; note = uridine-3'-phosphate
  modified_base 12: mod_base = OTHER; note = uridine-3'-phosphate
  modified_base 13: mod_base = OTHER; note = 2'-O-methyluridine-3'-phosphate
  modified_base 14: mod_base = OTHER; note = adenosine-3'-phosphate
  modified_base 15: mod_base = OTHER; note = uridine-3'-phosphate
  modified_base 16: mod_base = OTHER; note = 2'-O-methylcytidine-3'-phosphate
  modified_base 17: mod_base = OTHER; note = adenosine-3'-phosphate
  modified_base 18: mod_base = OTHER; note = guanosine-3'-phosphate
  modified_base 19: mod_base = OTHER; note = guanosine-3'-phosphate
  modified_base 20: mod_base = OTHER; note = 2'-deoxythymidine-3'-phosphorothioate
  misc_feature 1..19: note = RNA
  misc_feature 20..21: note = DNA
aactaaattttttatcaggtt

SEQ ID NO: 492 - DNA, 21 bp, synthetic construct
  source 1..21: mol_type = other DNA
  modified_base 1: mod_base = OTHER; note = uridine-3'-phosphate
  modified_base 2: mod_base = OTHER; note = uridine-3'-phosphate
  modified_base 3: mod_base = OTHER; note = 2'-O-methyluridine-3'-phosphate
  modified_base 4: mod_base = OTHER; note = adenosine-3'-phosphate
  modified_base 5: mod_base = OTHER; note = cytidine-3'-phosphate
  modified_base 6: mod_base = OTHER; note = 2'-O-methyluridine-3'-phosphate
  modified_base 7: mod_base = OTHER; note = adenosine-3'-phosphate
  modified_base 8: mod_base = OTHER; note = adenosine-3'-phosphate
  modified_base 9: mod_base = OTHER; note = guanosine-3'-phosphate
  modified_base 10: mod_base = OTHER; note = adenosine-3'-phosphate
  modified_base 11: mod_base = OTHER; note = uridine-3'-phosphate
  modified_base 12: mod_base = OTHER; note = uridine-3'-phosphate
  modified_base 13: mod_base = OTHER; note = uridine-3'-phosphate
  modified_base 14: mod_base = OTHER; note = cytidine-3'-phosphate
  modified_base 15: mod_base = OTHER; note = uridine-3'-phosphate
  modified_base 16: mod_base = OTHER; note = uridine-3'-phosphate
  modified_base 17: mod_base = OTHER; note = uridine-3'-phosphate
  modified_base 18: mod_base = OTHER; note = uridine-3'-phosphate
  modified_base 19: mod_base = OTHER; note = cytidine-3'-phosphate
  modified_base 20: mod_base = OTHER; note = 2'-deoxythymidine-3'-phosphorothioate
  misc_feature 1..19: note = RNA
  misc_feature 20..21: note = DNA
tttactaagatttcttttctt

SEQ ID NO: 493 - DNA, 21 bp, synthetic construct
  source 1..21: mol_type = other DNA
  modified_base 1: mod_base = OTHER; note = adenosine-3'-phosphate
  modified_base 2: mod_base = OTHER; note = adenosine-3'-phosphate
  modified_base 3: mod_base = OTHER; note = uridine-3'-phosphate
  modified_base 4: mod_base = OTHER; note = guanosine-3'-phosphate
  modified_base 5: mod_base = OTHER; note = uridine-3'-phosphate
  modified_base 6: mod_base = OTHER; note = uridine-3'-phosphate
  modified_base 7: mod_base = OTHER; note = 2'-O-methyluridine-3'-phosphate
  modified_base 8: mod_base = OTHER; note = adenosine-3'-phosphate
  modified_base 9: mod_base = OTHER; note = 2'-O-methyluridine-3'-phosphate
  modified_base 10: mod_base = OTHER; note = adenosine-3'-phosphate
  modified_base 11: mod_base = OTHER; note = cytidine-3'-phosphate
  modified_base 12: mod_base = OTHER; note = uridine-3'-phosphate
  modified_base 13: mod_base = OTHER; note = uridine-3'-phosphate
  modified_base 14: mod_base = OTHER; note = uridine-3'-phosphate
  modified_base 15: mod_base = OTHER; note = guanosine-3'-phosphate
  modified_base 16: mod_base = OTHER; note = adenosine-3'-phosphate
  modified_base 17: mod_base = OTHER; note = 2'-O-methyluridine-3'-phosphate
  modified_base 18: mod_base = OTHER; note = adenosine-3'-phosphate
  modified_base 19: mod_base = OTHER; note = adenosine-3'-phosphate
  modified_base 20: mod_base = OTHER; note = 2'-deoxythymidine-3'-phosphorothioate
  misc_feature 1..19: note = RNA
  misc_feature 20..21: note = DNA
aatgtttatactttgataatt

SEQ ID NO: 494 - DNA, 21 bp, synthetic construct
  source 1..21: mol_type = other DNA
  modified_base 1: mod_base = OTHER; note = adenosine-3'-phosphate
  modified_base 2: mod_base = OTHER; note = cytidine-3'-phosphate
  modified_base 3: mod_base = OTHER; note = 2'-O-methylcytidine-3'-phosphate
  modified_base 4: mod_base = OTHER; note = adenosine-3'-phosphate
  modified_base 5: mod_base = OTHER; note = adenosine-3'-phosphate
  modified_base 6: mod_base = OTHER; note = adenosine-3'-phosphate
  modified_base 7: mod_base = OTHER; note = uridine-3'-phosphate
  modified_base 8: mod_base = OTHER; note = uridine-3'-phosphate
  modified_base 9: mod_base = OTHER; note = 2'-O-methylcytidine-3'-phosphate
  modified_base 10: mod_base = OTHER; note = adenosine-3'-phosphate
  modified_base 11: mod_base = OTHER; note = guanosine-3'-phosphate
  modified_base 12: mod_base = OTHER; note = uridine-3'-phosphate
  modified_base 13: mod_base = OTHER; note = uridine-3'-phosphate
  modified_base 14: mod_base = OTHER; note = uridine-3'-phosphate
  modified_base 15: mod_base = OTHER; note = guanosine-3'-phosphate
  modified_base 16: mod_base = OTHER; note = 2'-O-methyluridine-3'-phosphate
  modified_base 17: mod_base = OTHER; note = adenosine-3'-phosphate
  modified_base 18: mod_base = OTHER; note = guanosine-3'-phosphate
  modified_base 19: mod_base = OTHER; note = guanosine-3'-phosphate
  modified_base 20: mod_base = OTHER; note = 2'-deoxythymidine-3'-phosphorothioate
  misc_feature 1..19: note = RNA
  misc_feature 20..21: note = DNA
accaaattcagtttgtaggtt

SEQ ID NO: 495 - DNA, 21 bp, synthetic construct
  source 1..21: mol_type = other DNA
  modified_base 1: mod_base = OTHER; note = adenosine-3'-phosphate
  modified_base 2: mod_base = OTHER; note = adenosine-3'-phosphate
  modified_base 3: mod_base = OTHER; note = uridine-3'-phosphate
  modified_base 4: mod_base = OTHER; note = guanosine-3'-phosphate
  modified_base 5: mod_base = OTHER; note = adenosine-3'-phosphate
  modified_base 6: mod_base = OTHER; note = 2'-O-methylcytidine-3'-phosphate
  modified_base 7: mod_base = OTHER; note = adenosine-3'-phosphate
  modified_base 8: mod_base = OTHER; note = 2'-O-methyluridine-3'-phosphate
  modified_base 9: mod_base = OTHER; note = adenosine-3'-phosphate
  modified_base 10: mod_base = OTHER; note = uridine-3'-phosphate
  modified_base 11: mod_base = OTHER; note = guanosine-3'-phosphate
  modified_base 12: mod_base = OTHER; note = uridine-3'-phosphate
  modified_base 13: mod_base = OTHER; note = uridine-3'-phosphate
  modified_base 14: mod_base = OTHER; note = uridine-3'-phosphate
  modified_base 15: mod_base = OTHER; note = guanosine-3'-phosphate
  modified_base 16: mod_base = OTHER; note = cytidine-3'-phosphate
  modified_base 17: mod_base = OTHER; note = uridine-3'-phosphate
  modified_base 18: mod_base = OTHER; note = cytidine-3'-phosphate
  modified_base 19: mod_base = OTHER; note = cytidine-3'-phosphate
  modified_base 20: mod_base = OTHER; note = 2'-deoxythymidine-3'-phosphorothioate
  misc_feature 1..19: note = RNA
  misc_feature 20..21: note = DNA
aatgacatatgtttgctcctt

SEQ ID NO: 496 - DNA, 21 bp, synthetic construct
  source 1..21: mol_type = other DNA
  modified_base 1: mod_base = OTHER; note = uridine-3'-phosphate
  modified_base 2: mod_base = OTHER; note = guanosine-3'-phosphate
  modified_base 3: mod_base = OTHER; note = adenosine-3'-phosphate
  modified_base 4: mod_base = OTHER; note = adenosine-3'-phosphate
  modified_base 5: mod_base = OTHER; note = cytidine-3'-phosphate
  modified_base 6: mod_base = OTHER; note = 2'-O-methyluridine-3'-phosphate
  modified_base 7: mod_base = OTHER; note = adenosine-3'-phosphate
  modified_base 8: mod_base = OTHER; note = 2'-O-methylcytidine-3'-phosphate
  modified_base 9: mod_base = OTHER; note = adenosine-3'-phosphate
  modified_base 10: mod_base = OTHER; note = guanosine-3'-phosphate
  modified_base 11: mod_base = OTHER; note = uridine-3'-phosphate
  modified_base 12: mod_base = OTHER; note = uridine-3'-phosphate
  modified_base 13: mod_base = OTHER; note = guanosine-3'-phosphate
  modified_base 14: mod_base = OTHER; note = uridine-3'-phosphate
  modified_base 15: mod_base = OTHER; note = 2'-O-methyluridine-3'-phosphate
  modified_base 16: mod_base = OTHER; note = adenosine-3'-phosphate
  modified_base 17: mod_base = OTHER; note = 2'-O-methylcytidine-3'-phosphate
  modified_base 18: mod_base = OTHER; note = adenosine-3'-phosphate
  modified_base 19: mod_base = OTHER; note = uridine-3'-phosphate
  modified_base 20: mod_base = OTHER; note = 2'-deoxythymidine-3'-phosphorothioate
  misc_feature 1..19: note = RNA
  misc_feature 20..21: note = DNA
tgaactacagttgttacattt

SEQ ID NO: 497 - DNA, 21 bp, synthetic construct
  source 1..21: mol_type = other DNA
  modified_base 1: mod_base = OTHER; note = adenosine-3'-phosphate
  modified_base 2: mod_base = OTHER; note = adenosine-3'-phosphate
  modified_base 3: mod_base = OTHER; note = adenosine-3'-phosphate
  modified_base 4: mod_base = OTHER; note = uridine-3'-phosphate
  modified_base 5: mod_base = OTHER; note = guanosine-3'-phosphate
  modified_base 6: mod_base = OTHER; note = uridine-3'-phosphate
  modified_base 7: mod_base = OTHER; note = uridine-3'-phosphate
  modified_base 8: mod_base = OTHER; note = cytidine-3'-phosphate
  modified_base 9: mod_base = OTHER; note = 2'-O-methylcytidine-3'-phosphate
  modified_base 10: mod_base = OTHER; note = adenosine-3'-phosphate
  modified_base 11: mod_base = OTHER; note = adenosine-3'-phosphate
  modified_base 12: mod_base = OTHER; note = uridine-3'-phosphate
  modified_base 13: mod_base = OTHER; note = guanosine-3'-phosphate
  modified_base 14: mod_base = OTHER; note = adenosine-3'-phosphate
  modified_base 15: mod_base = OTHER; note = uridine-3'-phosphate
  modified_base 16: mod_base = OTHER; note = uridine-3'-phosphate
  modified_base 17: mod_base = OTHER; note = uridine-3'-phosphate
  modified_base 18: mod_base = OTHER; note = cytidine-3'-phosphate
  modified_base 19: mod_base = OTHER; note = cytidine-3'-phosphate
  modified_base 20: mod_base = OTHER; note = 2'-deoxythymidine-3'-phosphorothioate
  misc_feature 1..19: note = RNA
  misc_feature 20..21: note = DNA
aaatgttccaatgatttcctt

SEQ ID NO: 498 - DNA, 21 bp, synthetic construct
  source 1..21: mol_type = other DNA
  modified_base 1: mod_base = OTHER; note = adenosine-3'-phosphate
  modified_base 2: mod_base = OTHER; note = guanosine-3'-phosphate
  modified_base 3: mod_base = OTHER; note = 2'-O-methyluridine-3'-phosphate
  modified_base 4: mod_base = OTHER; note = adenosine-3'-phosphate
  modified_base 5: mod_base = OTHER; note = adenosine-3'-phosphate
  modified_base 6: mod_base = OTHER; note = uridine-3'-phosphate
  modified_base 7: mod_base = OTHER; note = uridine-3'-phosphate
  modified_base 8: mod_base = OTHER; note = uridine-3'-phosphate
  modified_base 9: mod_base = OTHER; note = 2'-O-methylcytidine-3'-phosphate
  modified_base 10: mod_base = OTHER; note = adenosine-3'-phosphate
  modified_base 11: mod_base = OTHER; note = adenosine-3'-phosphate
  modified_base 12: mod_base = OTHER; note = adenosine-3'-phosphate
  modified_base 13: mod_base = OTHER; note = adenosine-3'-phosphate
  modified_base 14: mod_base = OTHER; note = uridine-3'-phosphate
  modified_base 15: mod_base = OTHER; note = uridine-3'-phosphate
  modified_base 16: mod_base = OTHER; note = cytidine-3'-phosphate
  modified_base 17: mod_base = OTHER; note = uridine-3'-phosphate
  modified_base 18: mod_base = OTHER; note = 2'-O-methyluridine-3'-phosphate
  modified_base 19: mod_base = OTHER; note = adenosine-3'-phosphate
  modified_base 20: mod_base = OTHER; note = 2'-deoxythymidine-3'-phosphorothioate
  misc_feature 1..19: note = RNA
  misc_feature 20..21: note = DNA
agtaatttcaaaattcttatt

SEQ ID NO: 499 - DNA, 21 bp, synthetic construct
  source 1..21: mol_type = other DNA
  modified_base 1: mod_base = OTHER; note = adenosine-3'-phosphate
  modified_base 2: mod_base = OTHER; note = uridine-3'-phosphate
  modified_base 3: mod_base = OTHER; note = cytidine-3'-phosphate
  modified_base 4: mod_base = OTHER; note = guanosine-3'-phosphate
  modified_base 5: mod_base = OTHER; note = adenosine-3'-phosphate
  modified_base 6: mod_base = OTHER; note = adenosine-3'-phosphate
  modified_base 7: mod_base = OTHER; note = uridine-3'-phosphate
  modified_base 8: mod_base = OTHER; note = uridine-3'-phosphate
  modified_base 9: mod_base = OTHER; note = 2'-O-methylcytidine-3'-phosphate
  modified_base 10: mod_base = OTHER; note = adenosine-3'-phosphate
  modified_base 11: mod_base = OTHER; note = guanosine-3'-phosphate
  modified_base 12: mod_base = OTHER; note = uridine-3'-phosphate
  modified_base 13: mod_base = OTHER; note = uridine-3'-phosphate
  modified_base 14: mod_base = OTHER; note = guanosine-3'-phosphate
  modified_base 15: mod_base = OTHER; note = 2'-O-methylcytidine-3'-phosphate
  modified_base 16: mod_base = OTHER; note = adenosine-3'-phosphate
  modified_base 17: mod_base = OTHER; note = guanosine-3'-phosphate
  modified_base 18: mod_base = OTHER; note = adenosine-3'-phosphate
  modified_base 19: mod_base = OTHER; note = adenosine-3'-phosphate
  modified_base 20: mod_base = OTHER; note = 2'-deoxythymidine-3'-phosphorothioate
  misc_feature 1..19: note = RNA
  misc_feature 20..21: note = DNA
atcgaattcagttgcagaatt

SEQ ID NO: 500 - DNA, 21 bp, synthetic construct
  source 1..21: mol_type = other DNA
  modified_base 1: mod_base = OTHER; note = uridine-3'-phosphate
  modified_base 2: mod_base = OTHER; note = guanosine-3'-phosphate
  modified_base 3: mod_base = OTHER; note = adenosine-3'-phosphate
  modified_base 4: mod_base = OTHER; note = adenosine-3'-phosphate
  modified_base 5: mod_base = OTHER; note = adenosine-3'-phosphate
  modified_base 6: mod_base = OTHER; note = 2'-O-methyluridine-3'-phosphate
  modified_base 7: mod_base = OTHER; note = adenosine-3'-phosphate
  modified_base 8: mod_base = OTHER; note = cytidine-3'-phosphate
  modified_base 9: mod_base = OTHER; note = uridine-3'-phosphate
  modified_base 10: mod_base = OTHER; note = cytidine-3'-phosphate
  modified_base 11: mod_base = OTHER; note = uridine-3'-phosphate
  modified_base 12: mod_base = OTHER; note = uridine-3'-phosphate
  modified_base 13: mod_base = OTHER; note = uridine-3'-phosphate
  modified_base 14: mod_base = OTHER; note = cytidine-3'-phosphate
  modified_base 15: mod_base = OTHER; note = 2'-O-methylcytidine-3'-phosphate
  modified_base 16: mod_base = OTHER; note = adenosine-3'-phosphate
  modified_base 17: mod_base = OTHER; note = adenosine-3'-phosphate
  modified_base 18: mod_base = OTHER; note = guanosine-3'-phosphate
  modified_base 19: mod_base = OTHER; note = guanosine-3'-phosphate
  modified_base 20: mod_base = OTHER; note = 2'-deoxythymidine-3'-phosphorothioate
  misc_feature 1..19: note = RNA
  misc_feature 20..21: note = DNA
tgaaatactctttccaaggtt

SEQ ID NO: 501 - DNA, 21 bp, synthetic construct
  source 1..21: mol_type = other DNA
  modified_base 1: mod_base = OTHER; note = guanosine-3'-phosphate
  modified_base 2: mod_base = OTHER; note = 2'-O-methyluridine-3'-phosphate
  modified_base 3: mod_base = OTHER; note = adenosine-3'-phosphate
  modified_base 4: mod_base = OTHER; note = adenosine-3'-phosphate
  modified_base 5: mod_base = OTHER; note = cytidine-3'-phosphate
  modified_base 6: mod_base = OTHER; note = 2'-O-methyluridine-3'-phosphate
  modified_base 7: mod_base = OTHER; note = adenosine-3'-phosphate
  modified_base 8: mod_base = OTHER; note = adenosine-3'-phosphate
  modified_base 9: mod_base = OTHER; note = adenosine-3'-phosphate
  modified_base 10: mod_base = OTHER; note = uridine-3'-phosphate
  modified_base 11: mod_base = OTHER; note = uridine-3'-phosphate
  modified_base 12: mod_base = OTHER; note = uridine-3'-phosphate
  modified_base 13: mod_base = OTHER; note = uridine-3'-phosphate
  modified_base 14: mod_base = OTHER; note = uridine-3'-phosphate
  modified_base 15: mod_base = OTHER; note = 2'-O-methyluridine-3'-phosphate
  modified_base 16: mod_base = OTHER; note = adenosine-3'-phosphate
  modified_base 17: mod_base = OTHER; note = uridine-3'-phosphate
  modified_base 18: mod_base = OTHER; note = 2'-O-methylcytidine-3'-phosphate
  modified_base 19: mod_base = OTHER; note = adenosine-3'-phosphate
  modified_base 20: mod_base = OTHER; note = 2'-deoxythymidine-3'-phosphorothioate
  misc_feature 1..19: note = RNA
  misc_feature 20..21: note = DNA
gtaactaaattttttatcatt

SEQ ID NO: 502 - DNA, 21 bp, synthetic construct
  source 1..21: mol_type = other DNA
  modified_base 1: mod_base = OTHER; note = uridine-3'-phosphate
  modified_base 2: mod_base = OTHER; note = uridine-3'-phosphate
  modified_base 3: mod_base = OTHER; note = guanosine-3'-phosphate
  modified_base 4: mod_base = OTHER; note = adenosine-3'-phosphate
  modified_base 5: mod_base = OTHER; note = adenosine-3'-phosphate
  modified_base 6: mod_base = OTHER; note = adenosine-3'-phosphate
  modified_base 7: mod_base = OTHER; note = 2'-O-methyluridine-3'-phosphate
  modified_base 8: mod_base = OTHER; note = adenosine-3'-phosphate
  modified_base 9: mod_base = OTHER; note = cytidine-3'-phosphate
  modified_base 10: mod_base = OTHER; note = uridine-3'-phosphate
  modified_base 11: mod_base = OTHER; note = cytidine-3'-phosphate
  modified_base 12: mod_base = OTHER; note = uridine-3'-phosphate
  modified_base 13: mod_base = OTHER; note = uridine-3'-phosphate
  modified_base 14: mod_base = OTHER; note = uridine-3'-phosphate
  modified_base 15: mod_base = OTHER; note = cytidine-3'-phosphate
  modified_base 16: mod_base = OTHER; note = 2'-O-methylcytidine-3'-phosphate
  modified_base 17: mod_base = OTHER; note = adenosine-3'-phosphate
  modified_base 18: mod_base = OTHER; note = adenosine-3'-phosphate
  modified_base 19: mod_base = OTHER; note = guanosine-3'-phosphate
  modified_base 20: mod_base = OTHER; note = 2'-deoxythymidine-3'-phosphorothioate
  misc_feature 1..19: note = RNA
  misc_feature 20..21: note = DNA
ttgaaatactctttccaagtt

SEQ ID NO: 503 - DNA, 21 bp, synthetic construct
  source 1..21: mol_type = other DNA
  modified_base 1: mod_base = OTHER; note = adenosine-3'-phosphate
  modified_base 2: mod_base = OTHER; note = adenosine-3'-phosphate
  modified_base 3: mod_base = OTHER; note = adenosine-3'-phosphate
  modified_base 4: mod_base = OTHER; note = uridine-3'-phosphate
  modified_base 5: mod_base = OTHER; note = cytidine-3'-phosphate
  modified_base 6: mod_base = OTHER; note = adenosine-3'-phosphate
  modified_base 7: mod_base = OTHER; note = adenosine-3'-phosphate
  modified_base 8: mod_base = OTHER; note = guanosine-3'-phosphate
  modified_base 9: mod_base = OTHER; note = uridine-3'-phosphate
  modified_base 10: mod_base = OTHER; note = adenosine-3'-phosphate
  modified_base 11: mod_base = OTHER; note = adenosine-3'-phosphate
  modified_base 12: mod_base = OTHER; note = uridine-3'-phosphate
  modified_base 13: mod_base = OTHER; note = uridine-3'-phosphate
  modified_base 14: mod_base = OTHER; note = adenosine-3'-phosphate
  modified_base 15: mod_base = OTHER; note = uridine-3'-phosphate
  modified_base 16: mod_base = OTHER; note = adenosine-3'-phosphate
  modified_base 17: mod_base = OTHER; note = guanosine-3'-phosphate
  modified_base 18: mod_base = OTHER; note = uridine-3'-phosphate
  modified_base 19: mod_base = OTHER; note = guanosine-3'-phosphate
  misc_feature 1..19: note = RNA
  misc_feature 20..21: note = DNA
aaatcaagtaattatagtgtt

SEQ ID NO: 504 - DNA, 21 bp, synthetic construct
  source 1..21: mol_type = other DNA
  modified_base 1: mod_base = OTHER; note = adenosine-3'-phosphate
  modified_base 2: mod_base = OTHER; note = adenosine-3'-phosphate
  modified_base 3: mod_base = OTHER; note = guanosine-3'-phosphate
  modified_base 4: mod_base = OTHER; note = uridine-3'-phosphate
  modified_base 5: mod_base = OTHER; note = adenosine-3'-phosphate
  modified_base 6: mod_base = OTHER; note = adenosine-3'-phosphate
  modified_base 7: mod_base = OTHER; note = uridine-3'-phosphate
  modified_base 8: mod_base = OTHER; note = uridine-3'-phosphate
  modified_base 9: mod_base = OTHER; note = adenosine-3'-phosphate
  modified_base 10: mod_base = OTHER; note = uridine-3'-phosphate
  modified_base 11: mod_base = OTHER; note = adenosine-3'-phosphate
  modified_base 12: mod_base = OTHER; note = guanosine-3'-phosphate
  modified_base 13: mod_base = OTHER; note = uridine-3'-phosphate
  modified_base 14: mod_base = OTHER; note = guanosine-3'-phosphate
  modified_base 15: mod_base = OTHER; note = adenosine-3'-phosphate
  modified_base 16: mod_base = OTHER; note = guanosine-3'-phosphate
  modified_base 17: mod_base = OTHER; note = uridine-3'-phosphate
  modified_base 18: mod_base = OTHER; note = uridine-3'-phosphate
  modified_base 19: mod_base = OTHER; note = adenosine-3'-phosphate
  misc_feature 1..19: note = RNA
  misc_feature 20..21: note = DNA
aagtaattatagtgagttatt

SEQ ID NO: 505 - DNA, 21 bp, synthetic construct
  source 1..21: mol_type = other DNA
  modified_base 1: mod_base = OTHER; note = uridine-3'-phosphate
  modified_base 2: mod_base = OTHER; note = uridine-3'-phosphate
  modified_base 3: mod_base = OTHER; note = adenosine-3'-phosphate
  modified_base 4: mod_base = OTHER; note = uridine-3'-phosphate
  modified_base 5: mod_base = OTHER; note = adenosine-3'-phosphate
  modified_base 6: mod_base = OTHER; note = guanosine-3'-phosphate
  modified_base 7: mod_base = OTHER; note = uridine-3'-phosphate
  modified_base 8: mod_base = OTHER; note = guanosine-3'-phosphate
  modified_base 9: mod_base = OTHER; note = adenosine-3'-phosphate
  modified_base 10: mod_base = OTHER; note = guanosine-3'-phosphate
  modified_base 11: mod_base = OTHER; note = uridine-3'-phosphate
  modified_base 12: mod_base = OTHER; note = uridine-3'-phosphate
  modified_base 13: mod_base = OTHER; note = adenosine-3'-phosphate
  modified_base 14: mod_base = OTHER; note = uridine-3'-phosphate
  modified_base 15: mod_base = OTHER; note = uridine-3'-phosphate
  modified_base 16: mod_base = OTHER; note = uridine-3'-phosphate
  modified_base 17: mod_base = OTHER; note = uridine-3'-phosphate
  modified_base 18: mod_base = OTHER; note = guanosine-3'-phosphate
  modified_base 19: mod_base = OTHER; note = uridine-3'-phosphate
  misc_feature 1..19: note = RNA
  misc_feature 20..21: note = DNA
ttatagtgagttattttgttt

SEQ ID NO: 506 - DNA, 21 bp, synthetic construct
  source 1..21: mol_type = other DNA
  modified_base 1: mod_base = OTHER; note = adenosine-3'-phosphate
  modified_base 2: mod_base = OTHER; note = adenosine-3'-phosphate
  modified_base 3: mod_base = OTHER; note = guanosine-3'-phosphate
  modified_base 4: mod_base = OTHER; note = guanosine-3'-phosphate
  modified_base 5: mod_base = OTHER; note = cytidine-3'-phosphate
  modified_base 6: mod_base = OTHER; note = cytidine-3'-phosphate
  modified_base 7: mod_base = OTHER; note = adenosine-3'-phosphate
  modified_base 8: mod_base = OTHER; note = adenosine-3'-phosphate
  modified_base 9: mod_base = OTHER; note = uridine-3'-phosphate
  modified_base 10: mod_base = OTHER; note = uridine-3'-phosphate
  modified_base 11: mod_base = OTHER; note = uridine-3'-phosphate
  modified_base 12: mod_base = OTHER; note = cytidine-3'-phosphate
  modified_base 13: mod_base = OTHER; note = cytidine-3'-phosphate
  modified_base 14: mod_base = OTHER; note = adenosine-3'-phosphate
  modified_base 15: mod_base = OTHER; note = guanosine-3'-phosphate
  modified_base 16: mod_base = OTHER; note = adenosine-3'-phosphate
  modified_base 17: mod_base = OTHER; note = guanosine-3'-phosphate
  modified_base 18: mod_base = OTHER; note = guanosine-3'-phosphate
  modified_base 19: mod_base = OTHER; note = adenosine-3'-phosphate
  misc_feature 1..19: note = RNA
  misc_feature 20..21: note = DNA
aaggccaatttccagaggatt

SEQ ID NO: 507 - DNA, 21 bp, synthetic construct
  source 1..21: mol_type = other DNA
  modified_base 1: mod_base = OTHER; note = adenosine-3'-phosphate
  modified_base 2: mod_base = OTHER; note = uridine-3'-phosphate
  modified_base 3: mod_base = OTHER; note = uridine-3'-phosphate
  modified_base 4: mod_base = OTHER; note = adenosine-3'-phosphate
  modified_base 5: mod_base = OTHER; note = uridine-3'-phosphate
  modified_base 6: mod_base = OTHER; note = adenosine-3'-phosphate
  modified_base 7: mod_base = OTHER; note = guanosine-3'-phosphate
  modified_base 8: mod_base = OTHER; note = uridine-3'-phosphate
  modified_base 9: mod_base = OTHER; note = guanosine-3'-phosphate
  modified_base 10: mod_base = OTHER; note = adenosine-3'-phosphate
  modified_base 11: mod_base = OTHER; note = guanosine-3'-phosphate
  modified_base 12: mod_base = OTHER; note = uridine-3'-phosphate
  modified_base 13: mod_base = OTHER; note = uridine-3'-phosphate
  modified_base 14: mod_base = OTHER; note = adenosine-3'-phosphate
  modified_base 15: mod_base = OTHER; note = uridine-3'-phosphate
  modified_base 16: mod_base = OTHER; note = uridine-3'-phosphate
  modified_base 17: mod_base = OTHER; note = uridine-3'-phosphate
  modified_base 18: mod_base = OTHER; note = uridine-3'-phosphate
  modified_base 19: mod_base = OTHER; note = guanosine-3'-phosphate
  misc_feature 1..19: note = RNA
  misc_feature 20..21: note = DNA
attatagtgagttattttgtt

SEQ ID NO: 508 - DNA, 21 bp, synthetic construct
  source 1..21: mol_type = other DNA
  modified_base 1: mod_base = OTHER; note = uridine-3'-phosphate
  modified_base 2: mod_base = OTHER; note = guanosine-3'-phosphate
  modified_base 3: mod_base = OTHER; note = adenosine-3'-phosphate
  modified_base 4: mod_base = OTHER; note = adenosine-3'-phosphate
  modified_base 5: mod_base = OTHER; note = guanosine-3'-phosphate
  modified_base 6: mod_base = OTHER; note = guanosine-3'-phosphate
  modified_base 7: mod_base = OTHER; note = cytidine-3'-phosphate
  modified_base 8: mod_base = OTHER; note = cytidine-3'-phosphate
  modified_base 9: mod_base = OTHER; note = adenosine-3'-phosphate
  modified_base 10: mod_base = OTHER; note = adenosine-3'-phosphate
  modified_base 11: mod_base = OTHER; note = uridine-3'-phosphate
  modified_base 12: mod_base = OTHER; note = uridine-3'-phosphate
  modified_base 13: mod_base = OTHER; note = uridine-3'-phosphate
  modified_base 14: mod_base = OTHER; note = cytidine-3'-phosphate
  modified_base 15: mod_base = OTHER; note = cytidine-3'-phosphate
  modified_base 16: mod_base = OTHER; note = adenosine-3'-phosphate
  modified_base 17: mod_base = OTHER; note = guanosine-3'-phosphate
  modified_base 18: mod_base = OTHER; note = adenosine-3'-phosphate
  modified_base 19: mod_base = OTHER; note = guanosine-3'-phosphate
  misc_feature 1..19: note = RNA
  misc_feature 20..21: note = DNA
tgaaggccaatttccagagtt

SEQ ID NO: 509 - DNA, 21 bp, synthetic construct
  source 1..21: mol_type = other DNA
  modified_base 1: mod_base = OTHER; note = uridine-3'-phosphate
  modified_base 2: mod_base = OTHER; note = adenosine-3'-phosphate
  modified_base 3: mod_base = OTHER; note = uridine-3'-phosphate
  modified_base 4: mod_base = OTHER; note = uridine-3'-phosphate
  modified_base 5: mod_base = OTHER; note = adenosine-3'-phosphate
  modified_base 6: mod_base = OTHER; note = uridine-3'-phosphate
  modified_base 7: mod_base = OTHER; note = adenosine-3'-phosphate
  modified_base 8: mod_base = OTHER; note = adenosine-3'-phosphate
  modified_base 9: mod_base = OTHER; note = adenosine-3'-phosphate
  modified_base 10: mod_base = OTHER; note = adenosine-3'-phosphate
  modified_base 11: mod_base = OTHER; note = adenosine-3'-phosphate
  modified_base 12: mod_base = OTHER; note = uridine-3'-phosphate
  modified_base 13: mod_base = OTHER; note = adenosine-3'-phosphate
  modified_base 14: mod_base = OTHER; note = uridine-3'-phosphate
  modified_base 15: mod_base = OTHER; note = cytidine-3'-phosphate
  modified_base 16: mod_base = OTHER; note = uridine-3'-phosphate
  modified_base 17: mod_base = OTHER; note = uridine-3'-phosphate
  modified_base 18: mod_base = OTHER; note = guanosine-3'-phosphate
  modified_base 19: mod_base = OTHER; note = cytidine-3'-phosphate
  misc_feature 1..19: note = RNA
  misc_feature 20..21: note = DNA
tattataaaaatatcttgctt

SEQ ID NO: 510 - DNA, 21 bp, synthetic construct
  source 1..21: mol_type = other DNA
  modified_base 1: mod_base = OTHER; note = uridine-3'-phosphate
  modified_base 2: mod_base = OTHER; note = guanosine-3'-phosphate
  modified_base 3: mod_base = OTHER; note = uridine-3'-phosphate
  modified_base 4: mod_base = OTHER; note = adenosine-3'-phosphate
  modified_base 5: mod_base = OTHER; note = cytidine-3'-phosphate
  modified_base 6: mod_base = OTHER; note = uridine-3'-phosphate
  modified_base 7: mod_base = OTHER; note = uridine-3'-phosphate
  modified_base 8: mod_base = OTHER; note = guanosine-3'-phosphate
  modified_base 9: mod_base = OTHER; note = adenosine-3'-phosphate
  modified_base 10: mod_base = OTHER; note = cytidine-3'-phosphate
  modified_base 11: mod_base = OTHER; note = adenosine-3'-phosphate
  modified_base 12: mod_base = OTHER; note = adenosine-3'-phosphate
  modified_base 13: mod_base = OTHER; note = adenosine-3'-phosphate
  modified_base 14: mod_base = OTHER; note = adenosine-3'-phosphate
  modified_base 15: mod_base = OTHER; note = adenosine-3'-phosphate
  modified_base 16: mod_base = OTHER; note = cytidine-3'-phosphate
  modified_base 17: mod_base = OTHER; note = adenosine-3'-phosphate
  modified_base 18: mod_base = OTHER; note = uridine-3'-phosphate
  modified_base 19: mod_base = OTHER; note = uridine-3'-phosphate
  misc_feature 1..19: note = RNA
  misc_feature 20..21: note = DNA
tgtacttgacaaaaacatttt

SEQ ID NO: 511 - DNA, 21 bp, synthetic construct
  source 1..21: mol_type = other DNA
  modified_base 1: mod_base = OTHER; note = adenosine-3'-phosphate
  modified_base 2: mod_base = OTHER; note = adenosine-3'-phosphate
  modified_base 3: mod_base = OTHER; note = adenosine-3'-phosphate
  modified_base 4: mod_base = OTHER; note = guanosine-3'-phosphate
  modified_base 5: mod_base = OTHER; note = guanosine-3'-phosphate
  modified_base 6: mod_base = OTHER; note = uridine-3'-phosphate
  modified_base 7: mod_base = OTHER; note = adenosine-3'-phosphate
  modified_base 8: mod_base = OTHER; note = cytidine-3'-phosphate
  modified_base 9: mod_base = OTHER; note = uridine-3'-phosphate
  modified_base 10: mod_base = OTHER; note = uridine-3'-phosphate
  modified_base 11: mod_base = OTHER; note = guanosine-3'-phosphate
  modified_base 12: mod_base = OTHER; note = uridine-3'-phosphate
  modified_base 13: mod_base = OTHER; note = uridine-3'-phosphate
  modified_base 14: mod_base = OTHER; note = guanosine-3'-phosphate
  modified_base 15: mod_base = OTHER; note = uridine-3'-phosphate
  modified_base 16: mod_base = OTHER; note = uridine-3'-phosphate
  modified_base 17: mod_base = OTHER; note = uridine-3'-phosphate
  modified_base 18: mod_base = OTHER; note = adenosine-3'-phosphate
  modified_base 19: mod_base = OTHER; note = adenosine-3'-phosphate
  misc_feature 1..19: note = RNA
  misc_feature 20..21: note = DNA
aaaggtacttgttgtttaatt

SEQ ID NO: 512 - DNA, 21 bp, synthetic construct
  source 1..21: mol_type = other DNA
  modified_base 1: mod_base = OTHER; note = uridine-3'-phosphate
  modified_base 2: mod_base = OTHER; note = cytidine-3'-phosphate
  modified_base 3: mod_base = OTHER; note = cytidine-3'-phosphate
  modified_base 4: mod_base = OTHER; note = uridine-3'-phosphate
  modified_base 5: mod_base = OTHER; note = uridine-3'-phosphate
  modified_base 6: mod_base = OTHER; note = cytidine-3'-phosphate
  modified_base 7: mod_base = OTHER; note = adenosine-3'-phosphate
  modified_base 8: mod_base = OTHER; note = cytidine-3'-phosphate
  modified_base 9: mod_base = OTHER; note = adenosine-3'-phosphate
  modified_base 10: mod_base = OTHER; note = guanosine-3'-phosphate
  modified_base 11: mod_base = OTHER; note = adenosine-3'-phosphate
  modified_base 12: mod_base = OTHER; note = cytidine-3'-phosphate
  modified_base 13: mod_base = OTHER; note = uridine-3'-phosphate
  modified_base 14: mod_base = OTHER; note = uridine-3'-phosphate
  modified_base 15: mod_base = OTHER; note = uridine-3'-phosphate
  modified_base 16: mod_base = OTHER; note = cytidine-3'-phosphate
  modified_base 17: mod_base = OTHER; note = uridine-3'-phosphate
  modified_base 18: mod_base = OTHER; note = guanosine-3'-phosphate
  modified_base 19: mod_base = OTHER; note = adenosine-3'-phosphate
  misc_feature 1..19: note = RNA
  misc_feature 20..21: note = DNA
tccttcacagactttctgatt

SEQ ID NO: 513 - DNA, 21 bp, synthetic construct
  source 1..21: mol_type = other DNA
  modified_base 1: mod_base = OTHER; note = uridine-3'-phosphate
  modified_base 2: mod_base = OTHER; note = uridine-3'-phosphate
  modified_base 3: mod_base = OTHER; note = guanosine-3'-phosphate
  modified_base 4: mod_base = OTHER; note = cytidine-3'-phosphate
  modified_base 5: mod_base = OTHER; note = adenosine-3'-phosphate
  modified_base 6: mod_base = OTHER; note = uridine-3'-phosphate
  modified_base 7: mod_base = OTHER; note = cytidine-3'-phosphate
  modified_base 8: mod_base = OTHER; note = adenosine-3'-phosphate
  modified_base 9: mod_base = OTHER; note = adenosine-3'-phosphate
  modified_base 10: mod_base = OTHER; note = adenosine-3'-phosphate
  modified_base 11: mod_base = OTHER; note = uridine-3'-phosphate
  modified_base 12: mod_base = OTHER; note = guanosine-3'-phosphate
  modified_base 13: mod_base = OTHER; note = cytidine-3'-phosphate
  modified_base 14: mod_base = OTHER; note = uridine-3'-phosphate
  modified_base 15: mod_base = OTHER; note = uridine-3'-phosphate
  modified_base 16: mod_base = OTHER; note = cytidine-3'-phosphate
  modified_base 17: mod_base = OTHER; note = adenosine-3'-phosphate
  modified_base 18: mod_base = OTHER; note = guanosine-3'-phosphate
  modified_base 19: mod_base = OTHER; note = uridine-3'-phosphate
  misc_feature 1..19: note = RNA
  misc_feature 20..21: note = DNA
ttgcatcaaatgcttcagttt

SEQ ID NO: 514 - DNA, 21 bp, synthetic construct
  source 1..21: mol_type = other DNA
  modified_base 1: mod_base = OTHER; note = guanosine-3'-phosphate
  modified_base 2: mod_base = OTHER; note = adenosine-3'-phosphate
  modified_base 3: mod_base = OTHER; note = cytidine-3'-phosphate
  modified_base 4: mod_base = OTHER; note = adenosine-3'-phosphate
  modified_base 5: mod_base = OTHER; note = uridine-3'-phosphate
  modified_base 6: mod_base = OTHER; note = uridine-3'-phosphate
  modified_base 7: mod_base = OTHER; note = uridine-3'-phosphate
  modified_base 8: mod_base = OTHER; note = uridine-3'-phosphate
  modified_base 9: mod_base = OTHER; note = adenosine-3'-phosphate
  modified_base 10: mod_base = OTHER; note = adenosine-3'-phosphate
  modified_base 11: mod_base = OTHER; note = cytidine-3'-phosphate
  modified_base 12: mod_base = OTHER; note = adenosine-3'-phosphate
  modified_base 13: mod_base = OTHER; note = cytidine-3'-phosphate
  modified_base 14: mod_base = OTHER; note = adenosine-3'-phosphate
  modified_base 15: mod_base = OTHER; note = guanosine-3'-phosphate
  modified_base 16: mod_base = OTHER; note = adenosine-3'-phosphate
  modified_base 17: mod_base = OTHER; note = adenosine-3'-phosphate
  modified_base 18: mod_base = OTHER; note = cytidine-3'-phosphate
  modified_base 19: mod_base = OTHER; note = uridine-3'-phosphate
  misc_feature 1..19: note = RNA
  misc_feature 20..21: note = DNA
gacattttaacacagaacttt

SEQ ID NO: 515 - DNA, 21 bp, synthetic construct
  source 1..21: mol_type = other DNA
  modified_base 1: mod_base = OTHER; note = adenosine-3'-phosphate
  modified_base 2: mod_base = OTHER; note = adenosine-3'-phosphate
  modified_base 3: mod_base = OTHER; note = adenosine-3'-phosphate
  modified_base 4: mod_base = OTHER; note = uridine-3'-phosphate
  modified_base 5: mod_base = OTHER; note = 2'-deoxy-2'-fluorocytidine-3'-phosphate
  modified_base 6: mod_base = OTHER; note = adenosine-3'-phosphate
  modified_base 7: mod_base = OTHER; note = adenosine-3'-phosphate
  modified_base 8: mod_base = OTHER; note = guanosine-3'-phosphate
  modified_base 9: mod_base = OTHER; note = 2'-deoxy-2'-fluorouridine-3'-phosphate
  modified_base 10: mod_base = OTHER; note = adenosine-3'-phosphate
  modified_base 11: mod_base = OTHER; note = adenosine-3'-phosphate
  modified_base 12: mod_base = OTHER; note = uridine-3'-phosphate
  modified_base 13: mod_base = OTHER; note = 2'-deoxy-2'-fluorouridine-3'-phosphate
  modified_base 14: mod_base = OTHER; note = adenosine-3'-phosphate
  modified_base 15: mod_base = OTHER; note = 2'-deoxy-2'-fluorouridine-3'-phosphate
  modified_base 16: mod_base = OTHER; note = adenosine-3'-phosphate
  modified_base 17: mod_base = OTHER; note = guanosine-3'-phosphate
  modified_base 18: mod_base = OTHER; note = uridine-3'-phosphate
  modified_base 19: mod_base = OTHER; note = guanosine-3'-phosphate
  modified_base 20: mod_base = OTHER; note = 2'-deoxythymidine-3'-phosphorothioate
  misc_feature 1..19: note = RNA
  misc_feature 20..21: note = DNA
aaatcaagtaattatagtgtt

SEQ ID NO: 516 - DNA, 21 bp, synthetic construct
  source 1..21: mol_type = other DNA
  modified_base 1: mod_base = OTHER; note = adenosine-3'-phosphate
  modified_base 2: mod_base = OTHER; note = adenosine-3'-phosphate
  modified_base 3: mod_base = OTHER; note = guanosine-3'-phosphate
  modified_base 4: mod_base = OTHER; note = 2'-deoxy-2'-fluorouridine-3'-phosphate
  modified_base 5: mod_base = OTHER; note = adenosine-3'-phosphate
  modified_base 6: mod_base = OTHER; note = adenosine-3'-phosphate
  modified_base 7: mod_base = OTHER; note = uridine-3'-phosphate
  modified_base 8: mod_base = OTHER; note = 2'-deoxy-2'-fluorouridine-3'-phosphate
  modified_base 9: mod_base = OTHER; note = adenosine-3'-phosphate
  modified_base 10: mod_base = OTHER; note = 2'-deoxy-2'-fluorouridine-3'-phosphate
  modified_base 11: mod_base = OTHER; note = adenosine-3'-phosphate
  modified_base 12: mod_base = OTHER; note = guanosine-3'-phosphate
  modified_base 13: mod_base = OTHER; note = uridine-3'-phosphate
  modified_base 14: mod_base = OTHER; note = guanosine-3'-phosphate
  modified_base 15: mod_base = OTHER; note = adenosine-3'-phosphate
  modified_base 16: mod_base = OTHER; note = guanosine-3'-phosphate
  modified_base 17: mod_base = OTHER; note = uridine-3'-phosphate
  modified_base 18: mod_base = OTHER; note = 2'-deoxy-2'-fluorouridine-3'-phosphate
  modified_base 19: mod_base = OTHER; note = adenosine-3'-phosphate
  modified_base 20: mod_base = OTHER; note = 2'-deoxythymidine-3'-phosphorothioate
  misc_feature 1..19: note = RNA
  misc_feature 20..21: note = DNA
aagtaattatagtgagttatt

SEQ ID NO: 517 - DNA, 21 bp, synthetic construct
  source 1..21: mol_type = other DNA
  modified_base 1: mod_base = OTHER; note = uridine-3'-phosphate
  modified_base 2: mod_base = OTHER; note = 2'-deoxy-2'-fluorouridine-3'-phosphate
  modified_base 3: mod_base = OTHER; note = adenosine-3'-phosphate
  modified_base 4: mod_base = OTHER; note = 2'-deoxy-2'-fluorouridine-3'-phosphate
  modified_base 5: mod_base = OTHER; note = adenosine-3'-phosphate
  modified_base 6: mod_base = OTHER; note = guanosine-3'-phosphate
  modified_base 7: mod_base = OTHER; note = uridine-3'-phosphate
  modified_base 8: mod_base = OTHER; note = guanosine-3'-phosphate
  modified_base 9: mod_base = OTHER; note = adenosine-3'-phosphate
  modified_base 10: mod_base = OTHER; note = guanosine-3'-phosphate
  modified_base 11: mod_base = OTHER; note = uridine-3'-phosphate
  modified_base 12: mod_base = OTHER; note = 2'-deoxy-2'-fluorouridine-3'-phosphate
  modified_base 13: mod_base = OTHER; note = adenosine-3'-phosphate
  modified_base 14: mod_base = OTHER; note = uridine-3'-phosphate
  modified_base 15: mod_base = OTHER; note = uridine-3'-phosphate
  modified_base 16: mod_base = OTHER; note = uridine-3'-phosphate
  modified_base 17: mod_base = OTHER; note = uridine-3'-phosphate
  modified_base 18: mod_base = OTHER; note = guanosine-3'-phosphate
  modified_base 19: mod_base = OTHER; note = uridine-3'-phosphate
  modified_base 20: mod_base = OTHER; note = 2'-deoxythymidine-3'-phosphorothioate
  misc_feature 1..19: note = RNA
  misc_feature 20..21: note = DNA
ttatagtgagttattttgttt

SEQ ID NO: 518 - DNA, 21 bp, synthetic construct
  source 1..21: mol_type = other DNA
  modified_base 1: mod_base = OTHER; note = adenosine-3'-phosphate
  modified_base 2: mod_base = OTHER; note = adenosine-3'-phosphate
  modified_base 3: mod_base = OTHER; note = guanosine-3'-phosphate
  modified_base 4: mod_base = OTHER; note = guanosine-3'-phosphate
  modified_base 5: mod_base = OTHER; note = cytidine-3'-phosphate
  modified_base 6: mod_base = OTHER; note = 2'-deoxy-2'-fluorocytidine-3'-phosphate
  modified_base 7: mod_base = OTHER; note = adenosine-3'-phosphate
  modified_base 8: mod_base = OTHER; note = adenosine-3'-phosphate
  modified_base 9: mod_base = OTHER; note = uridine-3'-phosphate
  modified_base 10: mod_base = OTHER; note = uridine-3'-phosphate
  modified_base 11: mod_base = OTHER; note = uridine-3'-phosphate
  modified_base 12: mod_base = OTHER; note = cytidine-3'-phosphate
  modified_base 13: mod_base = OTHER; note = 2'-deoxy-2'-fluorocytidine-3'-phosphate
  modified_base 14: mod_base = OTHER; note = adenosine-3'-phosphate
  modified_base 15: mod_base = OTHER; note = guanosine-3'-phosphate
  modified_base 16: mod_base = OTHER; note = adenosine-3'-phosphate
  modified_base 17: mod_base = OTHER; note = guanosine-3'-phosphate
  modified_base 18: mod_base = OTHER; note = guanosine-3'-phosphate
  modified_base 19: mod_base = OTHER; note = adenosine-3'-phosphate
  modified_base 20: mod_base = OTHER; note = 2'-deoxythymidine-3'-phosphorothioate
  misc_feature 1..19: note = RNA
  misc_feature 20..21: note = DNA
aaggccaatttccagaggatt

SEQ ID NO: 519 - DNA, 21 bp, synthetic construct
  source 1..21: mol_type = other DNA
  modified_base 1: mod_base = OTHER; note = adenosine-3'-phosphate
  modified_base 2: mod_base = OTHER; note = uridine-3'-phosphate
  modified_base 3: mod_base = OTHER; note = 2'-deoxy-2'-fluorouridine-3'-phosphate
  modified_base 4: mod_base = OTHER; note = adenosine-3'-phosphate
  modified_base 5: mod_base = OTHER; note = 2'-deoxy-2'-fluorouridine-3'-phosphate
  modified_base 6: mod_base = OTHER; note = adenosine-3'-phosphate
  modified_base 7: mod_base = OTHER; note = guanosine-3'-phosphate
  modified_base 8: mod_base = OTHER; note = uridine-3'-phosphate
  modified_base 9: mod_base = OTHER; note = guanosine-3'-phosphate
  modified_base 10: mod_base = OTHER; note = adenosine-3'-phosphate
  modified_base 11: mod_base = OTHER; note = guanosine-3'-phosphate
  modified_base 12: mod_base = OTHER; note = uridine-3'-phosphate
  modified_base 13: mod_base = OTHER; note = 2'-deoxy-2'-fluorouridine-3'-phosphate
  modified_base 14: mod_base = OTHER; note = adenosine-3'-phosphate
  modified_base 15: mod_base = OTHER; note = uridine-3'-phosphate
  modified_base 16: mod_base = OTHER; note = uridine-3'-phosphate
  modified_base 17: mod_base = OTHER; note = uridine-3'-phosphate
  modified_base 18: mod_base = OTHER; note = uridine-3'-phosphate
  modified_base 19: mod_base = OTHER; note = guanosine-3'-phosphate
  modified_base 20: mod_base = OTHER; note = 2'-deoxythymidine-3'-phosphorothioate
  misc_feature 1..19: note = RNA
  misc_feature 20..21: note = DNA
attatagtgagttattttgtt

SEQ ID NO: 520 - DNA, 21 bp, synthetic construct
  source 1..21: mol_type = other DNA
  modified_base 1: mod_base = OTHER; note = uridine-3'-phosphate
  modified_base 2: mod_base = OTHER; note = guanosine-3'-phosphate
  modified_base 3: mod_base = OTHER; note = adenosine-3'-phosphate
  modified_base 4: mod_base = OTHER; note = adenosine-3'-phosphate
  modified_base 5: mod_base = OTHER; note = guanosine-3'-phosphate
  modified_base 6: mod_base = OTHER; note = guanosine-3'-phosphate
  modified_base 7: mod_base = OTHER; note = cytidine-3'-phosphate
  modified_base 8: mod_base = OTHER; note = 2'-deoxy-2'-fluorocytidine-3'-phosphate
  modified_base 9: mod_base = OTHER; note = adenosine-3'-phosphate
  modified_base 10: mod_base = OTHER; note = adenosine-3'-phosphate
  modified_base 11: mod_base = OTHER; note = uridine-3'-phosphate
  modified_base 12: mod_base = OTHER; note = uridine-3'-phosphate
  modified_base 13: mod_base = OTHER; note = uridine-3'-phosphate
  modified_base 14: mod_base = OTHER; note = cytidine-3'-phosphate
  modified_base 15: mod_base = OTHER; note = 2'-deoxy-2'-fluorocytidine-3'-phosphate
  modified_base 16: mod_base = OTHER; note = adenosine-3'-phosphate
  modified_base 17: mod_base = OTHER; note = guanosine-3'-phosphate
  modified_base 18: mod_base = OTHER; note = adenosine-3'-phosphate
  modified_base 19: mod_base = OTHER; note = guanosine-3'-phosphate
  modified_base 20: mod_base = OTHER; note = 2'-deoxythymidine-3'-phosphorothioate
  misc_feature 1..19: note = RNA
  misc_feature 20..21: note = DNA
tgaaggccaatttccagagtt

SEQ ID NO: 521 - DNA, 21 bp, synthetic construct
  source 1..21: mol_type = other DNA
  modified_base 1: mod_base = OTHER; note = 2'-deoxy-2'-fluorouridine-3'-phosphate
  modified_base 2: mod_base = OTHER; note = adenosine-3'-phosphate
  modified_base 3: mod_base = OTHER; note = uridine-3'-phosphate
  modified_base 4: mod_base = OTHER; note = 2'-deoxy-2'-fluorouridine-3'-phosphate
  modified_base 5: mod_base = OTHER; note = adenosine-3'-phosphate
  modified_base 6: mod_base = OTHER; note = 2'-deoxy-2'-fluorouridine-3'-phosphate
  modified_base 7: mod_base = OTHER; note = adenosine-3'-phosphate
  modified_base 8: mod_base = OTHER; note = adenosine-3'-phosphate
  modified_base 9: mod_base = OTHER; note = adenosine-3'-phosphate
  modified_base 10: mod_base = OTHER; note = adenosine-3'-phosphate
  modified_base 11: mod_base = OTHER; note = adenosine-3'-phosphate
  modified_base 12: mod_base = OTHER; note = 2'-deoxy-2'-fluorouridine-3'-phosphate
  modified_base 13: mod_base = OTHER; note = adenosine-3'-phosphate
  modified_base 14: mod_base = OTHER; note = uridine-3'-phosphate
  modified_base 15: mod_base = OTHER; note = cytidine-3'-phosphate
  modified_base 16: mod_base = OTHER; note = uridine-3'-phosphate
  modified_base 17: mod_base = OTHER; note = uridine-3'-phosphate
  modified_base 18: mod_base = OTHER; note = guanosine-3'-phosphate
  modified_base 19: mod_base = OTHER; note = cytidine-3'-phosphate
  modified_base 20: mod_base = OTHER; note = 2'-deoxythymidine-3'-phosphorothioate
  misc_feature 1..19: note = RNA
  misc_feature 20..21: note = DNA
tattataaaaatatcttgctt

SEQ ID NO: 522 - DNA, 21 bp, synthetic construct
  source 1..21: mol_type = other DNA
  modified_base 1: mod_base = OTHER; note = uridine-3'-phosphate
  modified_base 2: mod_base = OTHER; note = guanosine-3'-phosphate
  modified_base 3: mod_base = OTHER; note = 2'-deoxy-2'-fluorouridine-3'-phosphate
  modified_base 4: mod_base = OTHER; note = adenosine-3'-phosphate
  modified_base 5: mod_base = OTHER; note = cytidine-3'-phosphate
  modified_base 6: mod_base = OTHER; note = uridine-3'-phosphate
  modified_base 7: mod_base = OTHER; note = uridine-3'-phosphate
  modified_base 8: mod_base = OTHER; note = guanosine-3'-phosphate
  modified_base 9: mod_base = OTHER; note = adenosine-3'-phosphate
  modified_base 10: mod_base = OTHER; note = 2'-deoxy-2'-fluorocytidine-3'-phosphate
  modified_base 11: mod_base = OTHER; note = adenosine-3'-phosphate
  modified_base 12: mod_base = OTHER; note = adenosine-3'-phosphate
  modified_base 13: mod_base = OTHER; note = adenosine-3'-phosphate
  modified_base 14: mod_base = OTHER; note = adenosine-3'-phosphate
  modified_base 15: mod_base = OTHER; note = adenosine-3'-phosphate
  modified_base 16: mod_base = OTHER; note = 2'-deoxy-2'-fluorocytidine-3'-phosphate
  modified_base 17: mod_base = OTHER; note = adenosine-3'-phosphate
  modified_base 18: mod_base = OTHER; note = uridine-3'-phosphate
  modified_base 19: mod_base = OTHER; note = uridine-3'-phosphate
  modified_base 20: mod_base = OTHER; note = 2'-deoxythymidine-3'-phosphorothioate
  misc_feature 1..19: note = RNA
  misc_feature 20..21: note = DNA
tgtacttgacaaaaacatttt

SEQ ID NO: 523 - DNA, 21 bp, synthetic construct
  source 1..21: mol_type = other DNA
  modified_base 1: mod_base = OTHER; note = adenosine-3'-phosphate
  modified_base 2: mod_base = OTHER; note = adenosine-3'-phosphate
  modified_base 3: mod_base = OTHER; note = adenosine-3'-phosphate
  modified_base 4: mod_base = OTHER; note = guanosine-3'-phosphate
  modified_base 5: mod_base = OTHER; note = guanosine-3'-phosphate
  modified_base 6: mod_base = OTHER; note = 2'-deoxy-2'-fluorouridine-3'-phosphate
  modified_base 7: mod_base = OTHER; note = adenosine-3'-phosphate
  modified_base 8: mod_base = OTHER; note = cytidine-3'-phosphate
  modified_base 9: mod_base = OTHER; note = uridine-3'-phosphate
  modified_base 10: mod_base = OTHER; note = uridine-3'-phosphate
  modified_base 11: mod_base = OTHER; note = guanosine-3'-phosphate
  modified_base 12: mod_base = OTHER; note = uridine-3'-phosphate
  modified_base 13: mod_base = OTHER; note = uridine-3'-phosphate
  modified_base 14: mod_base = OTHER; note = guanosine-3'-phosphate
  modified_base 15: mod_base = OTHER; note = uridine-3'-phosphate
  modified_base 16: mod_base = OTHER; note = uridine-3'-phosphate
  modified_base 17: mod_base = OTHER; note = 2'-deoxy-2'-fluorouridine-3'-phosphate
  modified_base 18: mod_base = OTHER; note = adenosine-3'-phosphate
  modified_base 19: mod_base = OTHER; note = adenosine-3'-phosphate
  modified_base 20: mod_base = OTHER; note = 2'-deoxythymidine-3'-phosphorothioate
  misc_feature 1..19: note = RNA
  misc_feature 20..21: note = DNA
aaaggtacttgttgtttaatt

SEQ ID NO: 524 - DNA, 21 bp, synthetic construct
  source 1..21: mol_type = other DNA
  modified_base 1: mod_base = OTHER; note = uridine-3'-phosphate
  modified_base 2: mod_base = OTHER; note = cytidine-3'-phosphate
  modified_base 3: mod_base = OTHER; note = cytidine-3'-phosphate
  modified_base 4: mod_base = OTHER; note = uridine-3'-phosphate
  modified_base 5: mod_base = OTHER; note = uridine-3'-phosphate
  modified_base 6: mod_base = OTHER; note = 2'-deoxy-2'-fluorocytidine-3'-phosphate
  modified_base 7: mod_base = OTHER; note = adenosine-3'-phosphate
  modified_base 8: mod_base = OTHER; note = 2'-deoxy-2'-fluorocytidine-3'-phosphate
  modified_base 9: mod_base = OTHER; note = adenosine-3'-phosphate
  modified_base 10: mod_base = OTHER; note = guanosine-3'-phosphate
  modified_base 11: mod_base = OTHER; note = adenosine-3'-phosphate
  modified_base 12: mod_base = OTHER; note = cytidine-3'-phosphate
  modified_base 13: mod_base = OTHER; note = uridine-3'-phosphate
  modified_base 14: mod_base = OTHER; note = uridine-3'-phosphate
  modified_base 15: mod_base = OTHER; note = uridine-3'-phosphate
  modified_base 16: mod_base = OTHER; note = cytidine-3'-phosphate
  modified_base 17: mod_base = OTHER; note = uridine-3'-phosphate
  modified_base 18: mod_base = OTHER; note = guanosine-3'-phosphate
  modified_base 19: mod_base = OTHER; note = adenosine-3'-phosphate
  modified_base 20: mod_base = OTHER; note = 2'-deoxythymidine-3'-phosphorothioate
  misc_feature 1..19: note = RNA
  misc_feature 20..21: note = DNA
tccttcacagactttctgatt

SEQ ID NO: 525 - DNA, 21 bp, synthetic construct
  source 1..21: mol_type = other DNA
  modified_base 1: mod_base = OTHER; note = uridine-3'-phosphate
  modified_base 2: mod_base = OTHER; note = uridine-3'-phosphate
  modified_base 3: mod_base = OTHER; note = guanosine-3'-phosphate
  modified_base 4: mod_base = OTHER; note = 2'-deoxy-2'-fluorocytidine-3'-phosphate
  modified_base 5: mod_base = OTHER; note = adenosine-3'-phosphate
  modified_base 6: mod_base = OTHER; note = uridine-3'-phosphate
  modified_base 7: mod_base = OTHER; note = 2'-deoxy-2'-fluorocytidine-3'-phosphate
  modified_base 8: mod_base = OTHER; note = adenosine-3'-phosphate
  modified_base 9: mod_base = OTHER; note = adenosine-3'-phosphate
  modified_base 10: mod_base = OTHER; note = adenosine-3'-phosphate
  modified_base 11: mod_base = OTHER; note = uridine-3'-phosphate
  modified_base 12: mod_base = OTHER; note = guanosine-3'-phosphate
  modified_base 13: mod_base = OTHER; note = cytidine-3'-phosphate
  modified_base 14: mod_base = OTHER; note = uridine-3'-phosphate
  modified_base 15: mod_base = OTHER; note = uridine-3'-phosphate
  modified_base 16: mod_base = OTHER; note = 2'-deoxy-2'-fluorocytidine-3'-phosphate
  modified_base 17: mod_base = OTHER; note = adenosine-3'-phosphate
  modified_base 18: mod_base = OTHER; note = guanosine-3'-phosphate
  modified_base 19: mod_base = OTHER; note = uridine-3'-phosphate
  modified_base 20: mod_base = OTHER; note = 2'-deoxythymidine-3'-phosphorothioate
  misc_feature 1..19: note = RNA
  misc_feature 20..21: note = DNA
ttgcatcaaatgcttcagttt

SEQ ID NO: 526 - DNA, 21 bp, synthetic construct
  source 1..21: mol_type = other DNA
  modified_base 1: mod_base = OTHER; note = guanosine-3'-phosphate
  modified_base 2: mod_base = OTHER; note = adenosine-3'-phosphate
  modified_base 3: mod_base = OTHER; note = 2'-deoxy-2'-fluorocytidine-3'-phosphate
  modified_base 4: mod_base = OTHER; note = adenosine-3'-phosphate
  modified_base 5: mod_base = OTHER; note = uridine-3'-phosphate
  modified_base 6: mod_base = OTHER; note = uridine-3'-phosphate
  modified_base 7: mod_base = OTHER; note = uridine-3'-phosphate
  modified_base 8: mod_base = OTHER; note = 2'-deoxy-2'-fluorouridine-3'-phosphate
  modified_base 9: mod_base = OTHER; note = adenosine-3'-phosphate
  modified_base 10: mod_base = OTHER; note = adenosine-3'-phosphate
  modified_base 11: mod_base = OTHER; note = 2'-deoxy-2'-fluorocytidine-3'-phosphate
  modified_base 12: mod_base = OTHER; note = adenosine-3'-phosphate
  modified_base 13: mod_base = OTHER; note = 2'-deoxy-2'-fluorocytidine-3'-phosphate
  modified_base 14: mod_base = OTHER; note = adenosine-3'-phosphate
  modified_base 15: mod_base = OTHER; note = guanosine-3'-phosphate
  modified_base 16: mod_base = OTHER; note = adenosine-3'-phosphate
  modified_base 17: mod_base = OTHER; note = adenosine-3'-phosphate
  modified_base 18: mod_base = OTHER; note = cytidine-3'-phosphate
  modified_base 19: mod_base = OTHER; note = uridine-3'-phosphate
  modified_base 20: mod_base = OTHER; note = 2'-deoxythymidine-3'-phosphorothioate
  misc_feature 1..19: note = RNA
  misc_feature 20..21: note = DNA
gacattttaacacagaacttt

SEQ ID NO: 527 - DNA, 21 bp, synthetic construct
  source 1..21: mol_type = other DNA
  modified_base 1: mod_base = OTHER; note = adenosine-3'-phosphate
  modified_base 2: mod_base = OTHER; note = adenosine-3'-phosphate
  modified_base 3: mod_base = OTHER; note = adenosine-3'-phosphate
  modified_base 4: mod_base = OTHER; note = uridine-3'-phosphate
  modified_base 5: mod_base = OTHER; note = 2'-O-methylcytidine-3'-phosphate
  modified_base 6: mod_base = OTHER; note = adenosine-3'-phosphate
  modified_base 7: mod_base = OTHER; note = adenosine-3'-phosphate
  modified_base 8: mod_base = OTHER; note = guanosine-3'-phosphate
  modified_base 9: mod_base = OTHER; note = 2'-O-methyluridine-3'-phosphate
  modified_base 10: mod_base = OTHER; note = adenosine-3'-phosphate
  modified_base 11: mod_base = OTHER; note = adenosine-3'-phosphate
  modified_base 12: mod_base = OTHER; note = uridine-3'-phosphate
  modified_base 13: mod_base = OTHER; note = 2'-O-methyluridine-3'-phosphate
  modified_base 14: mod_base = OTHER; note = adenosine-3'-phosphate
  modified_base 15: mod_base = OTHER; note = 2'-O-methyluridine-3'-phosphate
  modified_base 16: mod_base = OTHER; note = adenosine-3'-phosphate
  modified_base 17: mod_base = OTHER; note = guanosine-3'-phosphate
  modified_base 18: mod_base = OTHER; note = 2'-O-methyluridine-3'-phosphate
  modified_base 19: mod_base = OTHER; note = guanosine-3'-phosphate
  modified_base 20: mod_base = OTHER; note = 2'-deoxythymidine-3'-phosphorothioate
  misc_feature 1..19: note = RNA
  misc_feature 20..21: note = DNA
aaatcaagtaattatagtgtt

SEQ ID NO: 528 - DNA, 21 bp, synthetic construct
  source 1..21: mol_type = other DNA
  modified_base 1: mod_base = OTHER; note = adenosine-3'-phosphate
  modified_base 2: mod_base = OTHER; note = adenosine-3'-phosphate
  modified_base 3: mod_base = OTHER; note = guanosine-3'-phosphate
  modified_base 4: mod_base = OTHER; note = 2'-O-methyluridine-3'-phosphate
  modified_base 5: mod_base = OTHER; note = adenosine-3'-phosphate
  modified_base 6: mod_base = OTHER; note = adenosine-3'-phosphate
  modified_base 7: mod_base = OTHER; note = uridine-3'-phosphate
  modified_base 8: mod_base = OTHER; note = 2'-O-methyluridine-3'-phosphate
  modified_base 9: mod_base = OTHER; note = adenosine-3'-phosphate
  modified_base 10: mod_base = OTHER; note = 2'-O-methyluridine-3'-phosphate
  modified_base 11: mod_base = OTHER; note = adenosine-3'-phosphate
  modified_base 12: mod_base = OTHER; note = guanosine-3'-phosphate
  modified_base 13: mod_base = OTHER; note = 2'-O-methyluridine-3'-phosphate
  modified_base 14: mod_base = OTHER; note = guanosine-3'-phosphate
  modified_base 15: mod_base = OTHER; note = adenosine-3'-phosphate
  modified_base 16: mod_base = OTHER; note = guanosine-3'-phosphate
  modified_base 17: mod_base = OTHER; note = uridine-3'-phosphate
  modified_base 18: mod_base = OTHER; note = 2'-O-methyluridine-3'-phosphate
  modified_base 19: mod_base = OTHER; note = adenosine-3'-phosphate
  modified_base 20: mod_base = OTHER; note = 2'-deoxythymidine-3'-phosphorothioate
  misc_feature 1..19: note = RNA
  misc_feature 20..21: note = DNA
aagtaattatagtgagttatt

SEQ ID NO: 529 - DNA, 21 bp, synthetic construct
  source 1..21: mol_type = other DNA
  modified_base 1: mod_base = OTHER; note = uridine-3'-phosphate
  modified_base 2: mod_base = OTHER; note = 2'-O-methyluridine-3'-phosphate
  modified_base 3: mod_base = OTHER; note = adenosine-3'-phosphate
  modified_base 4: mod_base = OTHER; note = 2'-O-methyluridine-3'-phosphate
  modified_base 5: mod_base = OTHER; note = adenosine-3'-phosphate
  modified_base 6: mod_base = OTHER; note = guanosine-3'-phosphate
  modified_base 7: mod_base = OTHER; note = 2'-O-methyluridine-3'-phosphate
  modified_base 8: mod_base = OTHER; note = guanosine-3'-phosphate
  modified_base 9: mod_base = OTHER; note = adenosine-3'-phosphate
  modified_base 10: mod_base = OTHER; note = guanosine-3'-phosphate
  modified_base 11: mod_base = OTHER; note = uridine-3'-phosphate
  modified_base 12: mod_base = OTHER; note = 2'-O-methyluridine-3'-phosphate
  modified_base 13: mod_base = OTHER; note = adenosine-3'-phosphate
  modified_base 14: mod_base = OTHER; note = 2'-O-methyluridine-3'-phosphate
  modified_base 15: mod_base = OTHER; note = uridine-3'-phosphate
  modified_base 16: mod_base = OTHER; note = 2'-O-methyluridine-3'-phosphate
  modified_base 17: mod_base = OTHER; note = 2'-O-methyluridine-3'-phosphate
  modified_base 18: mod_base = OTHER; note = guanosine-3'-phosphate
  modified_base 19: mod_base = OTHER; note = uridine-3'-phosphate
  modified_base 20: mod_base = OTHER; note = 2'-deoxythymidine-3'-phosphorothioate
  misc_feature 1..19: note = RNA
  misc_feature 20..21: note = DNA
ttatagtgagttattttgttt

SEQ ID NO: 530 - DNA, 21 bp, synthetic construct
  source 1..21: mol_type = other DNA
  modified_base 1: mod_base = OTHER; note = adenosine-3'-phosphate
  modified_base 2: mod_base = OTHER; note = adenosine-3'-phosphate
  modified_base 3: mod_base = OTHER; note = guanosine-3'-phosphate
  modified_base 4: mod_base = OTHER; note = guanosine-3'-phosphate
  modified_base 5: mod_base = OTHER; note = cytidine-3'-phosphate
  modified_base 6: mod_base = OTHER; note = 2'-O-methylcytidine-3'-phosphate
  modified_base 7: mod_base = OTHER; note = adenosine-3'-phosphate
  modified_base 8: mod_base = OTHER; note = adenosine-3'-phosphate
  modified_base 9: mod_base = OTHER; note = 2'-O-methyluridine-3'-phosphate
  modified_base 10: mod_base = OTHER; note = uridine-3'-phosphate
  modified_base 11: mod_base = OTHER; note = uridine-3'-phosphate
  modified_base 12: mod_base = OTHER; note = cytidine-3'-phosphate
  modified_base 13: mod_base = OTHER; note = 2'-O-methylcytidine-3'-phosphate
  modified_base 14: mod_base = OTHER; note = adenosine-3'-phosphate
  modified_base 15: mod_base = OTHER; note = guanosine-3'-phosphate
  modified_base 16: mod_base = OTHER; note = adenosine-3'-phosphate
  modified_base 17: mod_base = OTHER; note = guanosine-3'-phosphate
  modified_base 18: mod_base = OTHER; note = guanosine-3'-phosphate
  modified_base 19: mod_base = OTHER; note = adenosine-3'-phosphate
  modified_base 20: mod_base = OTHER; note = 2'-deoxythymidine-3'-phosphorothioate
  misc_feature 1..19: note = RNA
  misc_feature 20..21: note = DNA
aaggccaatttccagaggatt

SEQ ID NO: 531 - DNA, 21 bp, synthetic construct
  source 1..21: mol_type = other DNA
  modified_base 1: mod_base = OTHER; note = adenosine-3'-phosphate
  modified_base 2: mod_base = OTHER; note = uridine-3'-phosphate
  modified_base 3: mod_base = OTHER; note = 2'-O-methyluridine-3'-phosphate
  modified_base 4: mod_base = OTHER; note = adenosine-3'-phosphate
  modified_base 5: mod_base = OTHER; note = 2'-O-methyluridine-3'-phosphate
  modified_base 6: mod_base = OTHER; note = adenosine-3'-phosphate
  modified_base 7: mod_base = OTHER; note = guanosine-3'-phosphate
  modified_base 8: mod_base = OTHER; note = 2'-O-methyluridine-3'-phosphate
  modified_base 9: mod_base = OTHER; note = guanosine-3'-phosphate
  modified_base 10: mod_base = OTHER; note = adenosine-3'-phosphate
  modified_base 11: mod_base = OTHER; note = guanosine-3'-phosphate
  modified_base 12: mod_base = OTHER; note = uridine-3'-phosphate
  modified_base 13: mod_base = OTHER; note = 2'-O-methyluridine-3'-phosphate
  modified_base 14: mod_base = OTHER; note = adenosine-3'-phosphate
  modified_base 15: mod_base = OTHER; note = 2'-O-methyluridine-3'-phosphate
  modified_base 16: mod_base = OTHER; note = uridine-3'-phosphate
  modified_base 17: mod_base = OTHER; note = 2'-O-methyluridine-3'-phosphate
  modified_base 18: mod_base = OTHER; note = 2'-O-methyluridine-3'-phosphate
  modified_base 19: mod_base = OTHER; note = guanosine-3'-phosphate
  modified_base 20: mod_base = OTHER; note = 2'-deoxythymidine-3'-phosphorothioate
  misc_feature 1..19: note = RNA
  misc_feature 20..21: note = DNA
attatagtgagttattttgtt

SEQ ID NO: 532 - DNA, 21 bp, synthetic construct
  source 1..21: mol_type = other DNA
  modified_base 1: mod_base = OTHER; note = 2'-O-methyluridine-3'-phosphate
  modified_base 2: mod_base = OTHER; note = guanosine-3'-phosphate
  modified_base 3: mod_base = OTHER; note = adenosine-3'-phosphate
  modified_base 4: mod_base = OTHER; note = adenosine-3'-phosphate
  modified_base 5: mod_base = OTHER; note = guanosine-3'-phosphate
  modified_base 6: mod_base = OTHER; note = guanosine-3'-phosphate
  modified_base 7: mod_base = OTHER; note = cytidine-3'-phosphate
  modified_base 8: mod_base = OTHER; note = 2'-O-methylcytidine-3'-phosphate
  modified_base 9: mod_base = OTHER; note = adenosine-3'-phosphate
  modified_base 10: mod_base = OTHER; note = adenosine-3'-phosphate
  modified_base 11: mod_base = OTHER; note = 2'-O-methyluridine-3'-phosphate
  modified_base 12: mod_base = OTHER; note = uridine-3'-phosphate
  modified_base 13: mod_base = OTHER; note = uridine-3'-phosphate
  modified_base 14: mod_base = OTHER; note = cytidine-3'-phosphate
  modified_base 15: mod_base = OTHER; note = 2'-O-methylcytidine-3'-phosphate
  modified_base 16: mod_base = OTHER; note = adenosine-3'-phosphate
  modified_base 17: mod_base = OTHER; note = guanosine-3'-phosphate
  modified_base 18: mod_base = OTHER; note = adenosine-3'-phosphate
  modified_base 19: mod_base = OTHER; note = guanosine-3'-phosphate
  modified_base 20: mod_base = OTHER; note = 2'-deoxythymidine-3'-phosphorothioate
  misc_feature 1..19: note = RNA
  misc_feature 20..21: note = DNA
tgaaggccaatttccagagtt

SEQ ID NO: 533 - DNA, 21 bp, synthetic construct
  source 1..21: mol_type = other DNA
  modified_base 1: mod_base = OTHER; note = 2'-O-methyluridine-3'-phosphate
  modified_base 2: mod_base = OTHER; note = adenosine-3'-phosphate
  modified_base 3: mod_base = OTHER; note = uridine-3'-phosphate
  modified_base 4: mod_base = OTHER; note = 2'-O-methyluridine-3'-phosphate
  modified_base 5: mod_base = OTHER; note = adenosine-3'-phosphate
  modified_base 6: mod_base = OTHER; note = 2'-O-methyluridine-3'-phosphate
  modified_base 7: mod_base = OTHER; note = adenosine-3'-phosphate
  modified_base 8: mod_base = OTHER; note = adenosine-3'-phosphate
  modified_base 9: mod_base = OTHER; note = adenosine-3'-phosphate
  modified_base 10: mod_base = OTHER; note = adenosine-3'-phosphate
  modified_base 11: mod_base = OTHER; note = adenosine-3'-phosphate
  modified_base 12: mod_base = OTHER; note = 2'-O-methyluridine-3'-phosphate
  modified_base 13: mod_base = OTHER; note = adenosine-3'-phosphate
  modified_base 14: mod_base = OTHER; note = uridine-3'-phosphate
  modified_base 15: mod_base = OTHER; note = cytidine-3'-phosphate
  modified_base 16: mod_base = OTHER; note = 2'-O-methyluridine-3'-phosphate
  modified_base 17: mod_base = OTHER; note = 2'-O-methyluridine-3'-phosphate
  modified_base 18: mod_base = OTHER; note = guanosine-3'-phosphate
  modified_base 19: mod_base = OTHER; note = cytidine-3'-phosphate
  modified_base 20: mod_base = OTHER; note = 2'-deoxythymidine-3'-phosphorothioate
  misc_feature 1..19: note = RNA
  misc_feature 20..21: note = DNA
tattataaaaatatcttgctt

SEQ ID NO: 534 - DNA, 21 bp, synthetic construct
  source 1..21: mol_type = other DNA
  modified_base 1: mod_base = OTHER; note = 2'-O-methyluridine-3'-phosphate
  modified_base 2: mod_base = OTHER; note = guanosine-3'-phosphate
  modified_base 3: mod_base = OTHER; note = 2'-O-methyluridine-3'-phosphate
  modified_base 4: mod_base = OTHER; note = adenosine-3'-phosphate
  modified_base 5: mod_base = OTHER; note = cytidine-3'-phosphate
  modified_base 6: mod_base = OTHER; note = 2'-O-methyluridine-3'-phosphate
  modified_base 7: mod_base = OTHER; note = 2'-O-methyluridine-3'-phosphate
  modified_base 8: mod_base = OTHER; note = guanosine-3'-phosphate
  modified_base 9: mod_base = OTHER; note = adenosine-3'-phosphate
  modified_base 10: mod_base = OTHER; note = 2'-O-methylcytidine-3'-phosphate
  modified_base 11: mod_base = OTHER; note = adenosine-3'-phosphate
  modified_base 12: mod_base = OTHER; note = adenosine-3'-phosphate
  modified_base 13: mod_base = OTHER; note = adenosine-3'-phosphate
  modified_base 14: mod_base = OTHER; note = adenosine-3'-phosphate
  modified_base 15: mod_base = OTHER; note = adenosine-3'-phosphate
  modified_base 16: mod_base = OTHER; note = 2'-O-methylcytidine-3'-phosphate
  modified_base 17: mod_base = OTHER; note = adenosine-3'-phosphate
  modified_base 18: mod_base = OTHER; note = 2'-O-methyluridine-3'-phosphate
  modified_base 19: mod_base = OTHER; note = uridine-3'-phosphate
  modified_base 20: mod_base = OTHER; note = 2'-deoxythymidine-3'-phosphorothioate
  misc_feature 1..19: note = RNA
  misc_feature 20..21: note = DNA
tgtacttgacaaaaacatttt

SEQ ID NO: 535 - DNA, 21 bp, synthetic construct
  source 1..21: mol_type = other DNA
  modified_base 1: mod_base = OTHER; note = adenosine-3'-phosphate
  modified_base 2: mod_base = OTHER; note = adenosine-3'-phosphate
  modified_base 3: mod_base = OTHER; note = adenosine-3'-phosphate
  modified_base 4: mod_base = OTHER; note = guanosine-3'-phosphate
  modified_base 5: mod_base = OTHER; note = guanosine-3'-phosphate
  modified_base 6: mod_base = OTHER; note = 2'-O-methyluridine-3'-phosphate
  modified_base 7: mod_base = OTHER; note = adenosine-3'-phosphate
  modified_base 8: mod_base = OTHER; note = cytidine-3'-phosphate
  modified_base 9: mod_base = OTHER; note = 2'-O-methyluridine-3'-phosphate
  modified_base 10: mod_base = OTHER; note = 2'-O-methyluridine-3'-phosphate
  modified_base 11: mod_base = OTHER; note = guanosine-3'-phosphate
  modified_base 12: mod_base = OTHER; note = 2'-O-methyluridine-3'-phosphate
  modified_base 13: mod_base = OTHER; note = 2'-O-methyluridine-3'-phosphate
  modified_base 14: mod_base = OTHER; note = guanosine-3'-phosphate
  modified_base 15: mod_base = OTHER; note = 2'-O-methyluridine-3'-phosphate
  modified_base 16: mod_base = OTHER; note = uridine-3'-phosphate
  modified_base 17: mod_base = OTHER; note = 2'-O-methyluridine-3'-phosphate
  modified_base 18: mod_base = OTHER; note = adenosine-3'-phosphate
  modified_base 19: mod_base = OTHER; note = adenosine-3'-phosphate
  modified_base 20: mod_base = OTHER; note = 2'-deoxythymidine-3'-phosphorothioate
  misc_feature 1..19: note = RNA
  misc_feature 20..21: note = DNA
aaaggtacttgttgtttaatt

SEQ ID NO: 536 - DNA, 21 bp, synthetic construct
  source 1..21: mol_type = other DNA
  modified_base 1: mod_base = OTHER; note = uridine-3'-phosphate
  modified_base 2: mod_base = OTHER; note = cytidine-3'-phosphate
  modified_base 3: mod_base = OTHER; note = cytidine-3'-phosphate
  modified_base 4: mod_base = OTHER; note = 2'-O-methyluridine-3'-phosphate
  modified_base 5: mod_base = OTHER; note = uridine-3'-phosphate
  modified_base 6: mod_base = OTHER; note = 2'-O-methylcytidine-3'-phosphate
  modified_base 7: mod_base = OTHER; note = adenosine-3'-phosphate
  modified_base 8: mod_base = OTHER; note = 2'-O-methylcytidine-3'-phosphate
  modified_base 9: mod_base = OTHER; note = adenosine-3'-phosphate
  modified_base 10: mod_base = OTHER; note = guanosine-3'-phosphate
  modified_base 11: mod_base = OTHER; note = adenosine-3'-phosphate
  modified_base 12: mod_base = OTHER; note = cytidine-3'-phosphate
  modified_base 13: mod_base = OTHER; note = 2'-O-methyluridine-3'-phosphate
  modified_base 14: mod_base = OTHER; note = uridine-3'-phosphate
  modified_base 15: mod_base = OTHER; note = uridine-3'-phosphate
  modified_base 16: mod_base = OTHER; note = cytidine-3'-phosphate
  modified_base 17: mod_base = OTHER; note = 2'-O-methyluridine-3'-phosphate
  modified_base 18: mod_base = OTHER; note = guanosine-3'-phosphate
  modified_base 19: mod_base = OTHER; note = adenosine-3'-phosphate
  modified_base 20: mod_base = OTHER; note = 2'-deoxythymidine-3'-phosphorothioate
  misc_feature 1..19: note = RNA
  misc_feature 20..21: note = DNA
tccttcacagactttctgatt

SEQ ID NO: 537 - DNA, 21 bp, synthetic construct
  source 1..21: mol_type = other DNA
  modified_base 1: mod_base = OTHER; note = 2'-O-methyluridine-3'-phosphate
  modified_base 2: mod_base = OTHER; note = 2'-O-methyluridine-3'-phosphate
  modified_base 3: mod_base = OTHER; note = guanosine-3'-phosphate
  modified_base 4: mod_base = OTHER; note = 2'-O-methylcytidine-3'-phosphate
  modified_base 5: mod_base = OTHER; note = adenosine-3'-phosphate
  modified_base 6: mod_base = OTHER; note = uridine-3'-phosphate
  modified_base 7: mod_base = OTHER; note = 2'-O-methylcytidine-3'-phosphate
  modified_base 8: mod_base = OTHER; note = adenosine-3'-phosphate
  modified_base 9: mod_base = OTHER; note = adenosine-3'-phosphate
  modified_base 10: mod_base = OTHER; note = adenosine-3'-phosphate
  modified_base 11: mod_base = OTHER; note = 2'-O-methyluridine-3'-phosphate
  modified_base 12: mod_base = OTHER; note = guanosine-3'-phosphate
  modified_base 13: mod_base = OTHER; note = cytidine-3'-phosphate
  modified_base 14: mod_base = OTHER; note = 2'-O-methyluridine-3'-phosphate
  modified_base 15: mod_base = OTHER; note = uridine-3'-phosphate
  modified_base 16: mod_base = OTHER; note = 2'-O-methylcytidine-3'-phosphate
  modified_base 17: mod_base = OTHER; note = adenosine-3'-phosphate
  modified_base 18: mod_base = OTHER; note = guanosine-3'-phosphate
  modified_base 19: mod_base = OTHER; note = uridine-3'-phosphate
  modified_base 20: mod_base = OTHER; note = 2'-deoxythymidine-3'-phosphorothioate
  misc_feature 1..19: note = RNA
  misc_feature 20..21: note = DNA
ttgcatcaaatgcttcagttt

SEQ ID NO: 538 - DNA, 21 bp, synthetic construct
  source 1..21: mol_type = other DNA
  modified_base 1: mod_base = OTHER; note = guanosine-3'-phosphate
  modified_base 2: mod_base = OTHER; note = adenosine-3'-phosphate
  modified_base 3: mod_base = OTHER; note = 2'-O-methylcytidine-3'-phosphate
  modified_base 4: mod_base = OTHER; note = adenosine-3'-phosphate
  modified_base 5: mod_base = OTHER; note = 2'-O-methyluridine-3'-phosphate
  modified_base 6: mod_base = OTHER; note = uridine-3'-phosphate
  modified_base 7: mod_base = OTHER; note = uridine-3'-phosphate
  modified_base 8: mod_base = OTHER; note = 2'-O-methyluridine-3'-phosphate
  modified_base 9: mod_base = OTHER; note = adenosine-3'-phosphate
  modified_base 10: mod_base = OTHER; note = adenosine-3'-phosphate
  modified_base 11: mod_base = OTHER; note = 2'-O-methylcytidine-3'-phosphate
  modified_base 12: mod_base = OTHER; note = adenosine-3'-phosphate
  modified_base 13: mod_base = OTHER; note = 2'-O-methylcytidine-3'-phosphate
  modified_base 14: mod_base = OTHER; note = adenosine-3'-phosphate
  modified_base 15: mod_base = OTHER; note = guanosine-3'-phosphate
  modified_base 16: mod_base = OTHER; note = adenosine-3'-phosphate
  modified_base 17: mod_base = OTHER; note = adenosine-3'-phosphate
  modified_base 18: mod_base = OTHER; note = cytidine-3'-phosphate
  modified_base 19: mod_base = OTHER; note = uridine-3'-phosphate
  modified_base 20: mod_base = OTHER; note = 2'-deoxythymidine-3'-phosphorothioate
  misc_feature 1..19: note = RNA
  misc_feature 20..21: note = DNA
gacattttaacacagaacttt

SEQ ID NO: 539 - DNA, 21 bp, synthetic construct
  source 1..21: mol_type = other DNA
  modified_base 1: mod_base = OTHER; note = adenosine-3'-phosphate
  modified_base 2: mod_base = OTHER; note = adenosine-3'-phosphate
  modified_base 3: mod_base = OTHER; note = adenosine-3'-phosphate
  modified_base 4: mod_base = OTHER; note = uridine-3'-phosphate
  modified_base 5: mod_base = OTHER; note = cytidine-3'-phosphate
  modified_base 6: mod_base = OTHER; note = adenosine-3'-phosphate
  modified_base 7: mod_base = OTHER; note = adenosine-3'-phosphate
  modified_base 8: mod_base = OTHER; note = guanosine-3'-phosphate
  modified_base 9: mod_base = OTHER; note = 2'-O-methyluridine-3'-phosphate
  modified_base 10: mod_base = OTHER; note = adenosine-3'-phosphate
  modified_base 11: mod_base = OTHER; note = adenosine-3'-phosphate
  modified_base 12: mod_base = OTHER; note = 2'-O-methyluridine-3'-phosphate
  modified_base 13: mod_base = OTHER; note = 2'-O-methyluridine-3'-phosphate
  modified_base 14: mod_base = OTHER; note = adenosine-3'-phosphate
  modified_base 15: mod_base = OTHER; note = 2'-O-methyluridine-3'-phosphate
  modified_base 16: mod_base = OTHER; note = adenosine-3'-phosphate
  modified_base 17: mod_base = OTHER; note = 2'-O-methylguanosine-3'-phosphate
  modified_base 18: mod_base = OTHER; note = 2'-O-methyluridine-3'-phosphate
  modified_base 19: mod_base = OTHER; note = 2'-O-methylguanosine-3'-phosphate
  modified_base 20: mod_base = OTHER; note = 2'-deoxythymidine-3'-phosphorothioate
  misc_feature 1..19: note = RNA
  misc_feature 20..21: note = DNA
aaatcaagtaattatagtgtt

SEQ ID NO: 540 - DNA, 21 bp, synthetic construct
  source 1..21: mol_type = other DNA
  modified_base 1: mod_base = OTHER; note = adenosine-3'-phosphate
  modified_base 2: mod_base = OTHER; note = adenosine-3'-phosphate
  modified_base 3: mod_base = OTHER; note = guanosine-3'-phosphate
  modified_base 4: mod_base = OTHER; note = 2'-O-methyluridine-3'-phosphate
  modified_base 5: mod_base = OTHER; note = adenosine-3'-phosphate
  modified_base 6: mod_base = OTHER; note = adenosine-3'-phosphate
  modified_base 7: mod_base = OTHER; note = 2'-O-methyluridine-3'-phosphate
  modified_base 8: mod_base = OTHER; note = uridine-3'-phosphate
  modified_base 9: mod_base = OTHER; note = adenosine-3'-phosphate
  modified_base 10: mod_base = OTHER; note = 2'-O-methyluridine-3'-phosphate
  modified_base 11: mod_base = OTHER; note = adenosine-3'-phosphate
  modified_base 12: mod_base = OTHER; note = guanosine-3'-phosphate
  modified_base 13: mod_base = OTHER; note = 2'-O-methyluridine-3'-phosphate
  modified_base 14: mod_base = OTHER; note = guanosine-3'-phosphate
  modified_base 15: mod_base = OTHER; note = adenosine-3'-phosphate
  modified_base 16: mod_base = OTHER; note = guanosine-3'-phosphate
  modified_base 17: mod_base = OTHER; note = 2'-O-methyluridine-3'-phosphate
  modified_base 18: mod_base = OTHER; note = 2'-O-methyluridine-3'-phosphate
  modified_base 19: mod_base = OTHER; note = 2'-O-methyladenosine-3'-phosphate
  modified_base 20: mod_base = OTHER; note = 2'-deoxythymidine-3'-phosphorothioate
  misc_feature 1..19: note = RNA
  misc_feature 20..21: note = DNA
aagtaattatagtgagttatt

SEQ ID NO: 541 - DNA, 21 bp, synthetic construct
  source 1..21: mol_type = other DNA
  modified_base 1: mod_base = OTHER; note = uridine-3'-phosphate
  modified_base 2: mod_base = OTHER; note = 2'-O-methyluridine-3'-phosphate
  modified_base 3: mod_base = OTHER; note = adenosine-3'-phosphate
  modified_base 4: mod_base = OTHER; note = 2'-O-methyluridine-3'-phosphate
  modified_base 5: mod_base = OTHER; note = adenosine-3'-phosphate
  modified_base 6: mod_base = OTHER; note = guanosine-3'-phosphate
  modified_base 7: mod_base = OTHER; note = 2'-O-methyluridine-3'-phosphate
  modified_base 8: mod_base = OTHER; note = guanosine-3'-phosphate
  modified_base 9: mod_base = OTHER; note = adenosine-3'-phosphate
  modified_base 10: mod_base = OTHER; note = guanosine-3'-phosphate
  modified_base 11: mod_base = OTHER; note = 2'-O-methyluridine-3'-phosphate
  modified_base 12: mod_base = OTHER; note = 2'-O-methyluridine-3'-phosphate
  modified_base 13: mod_base = OTHER; note = adenosine-3'-phosphate
  modified_base 14: mod_base = OTHER; note = 2'-O-methyluridine-3'-phosphate
  modified_base 15: mod_base = OTHER; note = 2'-O-methyluridine-3'-phosphate
  modified_base 16: mod_base = OTHER; note = 2'-O-methyluridine-3'-phosphate
  modified_base 17: mod_base = OTHER; note = 2'-O-methyluridine-3'-phosphate
  modified_base 18: mod_base = OTHER; note = 2'-O-methylguanosine-3'-phosphate
  modified_base 19: mod_base = OTHER; note = 2'-O-methyluridine-3'-phosphate
  modified_base 20: mod_base = OTHER; note = 2'-deoxythymidine-3'-phosphorothioate
  misc_feature 1..19: note = RNA
  misc_feature 20..21: note = DNA
ttatagtgagttattttgttt

SEQ ID NO: 542 - DNA, 21 bp, synthetic construct
  source 1..21: mol_type = other DNA
  modified_base 1: mod_base = OTHER; note = adenosine-3'-phosphate
  modified_base 2: mod_base = OTHER; note = adenosine-3'-phosphate
  modified_base 3: mod_base = OTHER; note = guanosine-3'-phosphate
  modified_base 4: mod_base = OTHER; note = guanosine-3'-phosphate
  modified_base 5: mod_base = OTHER; note = cytidine-3'-phosphate
  modified_base 6: mod_base = OTHER; note = cytidine-3'-phosphate
  modified_base 7: mod_base = OTHER; note = adenosine-3'-phosphate
  modified_base 8: mod_base = OTHER; note = adenosine-3'-phosphate
  modified_base 9: mod_base = OTHER; note = 2'-O-methyluridine-3'-phosphate
  modified_base 10: mod_base = OTHER; note = uridine-3'-phosphate
  modified_base 11: mod_base = OTHER; note = 2'-O-methyluridine-3'-phosphate
  modified_base 12: mod_base = OTHER; note = cytidine-3'-phosphate
  modified_base 13: mod_base = OTHER; note = cytidine-3'-phosphate
  modified_base 14: mod_base = OTHER; note = adenosine-3'-phosphate
  modified_base 15: mod_base = OTHER; note = guanosine-3'-phosphate
  modified_base 16: mod_base = OTHER; note = adenosine-3'-phosphate
  modified_base 17: mod_base = OTHER; note = 2'-O-methylguanosine-3'-phosphate
  modified_base 18: mod_base = OTHER; note = 2'-O-methylguanosine-3'-phosphate
  modified_base 19: mod_base = OTHER; note = 2'-O-methyladenosine-3'-phosphate
  modified_base 20: mod_base = OTHER; note = 2'-deoxythymidine-3'-phosphorothioate
  misc_feature 1..19: note = RNA
  misc_feature 20..21: note = DNA
aaggccaatttccagaggatt

SEQ ID NO: 543 - DNA, 21 bp, synthetic construct
  source 1..21: mol_type = other DNA
  modified_base 1: mod_base = OTHER; note = adenosine-3'-phosphate
  modified_base 2: mod_base = OTHER; note = 2'-O-methyluridine-3'-phosphate
  modified_base 3: mod_base = OTHER; note = uridine-3'-phosphate
  modified_base 4: mod_base = OTHER; note = adenosine-3'-phosphate
  modified_base 5: mod_base = OTHER; note = 2'-O-methyluridine-3'-phosphate
  modified_base 6: mod_base = OTHER; note = adenosine-3'-phosphate
  modified_base 7: mod_base = OTHER; note = guanosine-3'-phosphate
  modified_base 8: mod_base = OTHER; note = 2'-O-methyluridine-3'-phosphate
  modified_base 9: mod_base = OTHER; note = guanosine-3'-phosphate
  modified_base 10: mod_base = OTHER; note = adenosine-3'-phosphate
  modified_base 11: mod_base = OTHER; note = guanosine-3'-phosphate
  modified_base 12: mod_base = OTHER; note = 2'-O-methyluridine-3'-phosphate
  modified_base 13: mod_base = OTHER; note = 2'-O-methyluridine-3'-phosphate
  modified_base 14: mod_base = OTHER; note = adenosine-3'-phosphate
  modified_base 15: mod_base = OTHER; note = 2'-O-methyluridine-3'-phosphate
  modified_base 16: mod_base = OTHER; note = 2'-O-methyluridine-3'-phosphate
  modified_base 17: mod_base = OTHER; note = 2'-O-methyluridine-3'-phosphate
  modified_base 18: mod_base = OTHER; note = 2'-O-methyluridine-3'-phosphate
  modified_base 19: mod_base = OTHER; note = 2'-O-methylguanosine-3'-phosphate
  modified_base 20: mod_base = OTHER; note = 2'-deoxythymidine-3'-phosphorothioate
  misc_feature 1..19: note = RNA
  misc_feature 20..21: note = DNA
attatagtgagttattttgtt

SEQ ID NO: 544 - DNA, 21 bp, synthetic construct
  source 1..21: mol_type = other DNA
  modified_base 1: mod_base = OTHER; note = uridine-3'-phosphate
  modified_base 2: mod_base = OTHER; note = guanosine-3'-phosphate
  modified_base 3: mod_base = OTHER; note = adenosine-3'-phosphate
  modified_base 4: mod_base = OTHER; note = adenosine-3'-phosphate
  modified_base 5: mod_base = OTHER; note = guanosine-3'-phosphate
  modified_base 6: mod_base = OTHER; note = guanosine-3'-phosphate
  modified_base 7: mod_base = OTHER; note = cytidine-3'-phosphate
  modified_base 8: mod_base = OTHER; note = cytidine-3'-phosphate
  modified_base 9: mod_base = OTHER; note = adenosine-3'-phosphate
  modified_base 10: mod_base = OTHER; note = adenosine-3'-phosphate
  modified_base 11: mod_base = OTHER; note = 2'-O-methyluridine-3'-phosphate
  modified_base 12: mod_base = OTHER; note = 2'-O-methyluridine-3'-phosphate
  modified_base 13: mod_base = OTHER; note = 2'-O-methyluridine-3'-phosphate
  modified_base 14: mod_base = OTHER; note = cytidine-3'-phosphate
  modified_base 15: mod_base = OTHER; note = cytidine-3'-phosphate
  modified_base 16: mod_base = OTHER; note = adenosine-3'-phosphate
  modified_base 17: mod_base = OTHER; note = 2'-O-methylguanosine-3'-phosphate
  modified_base 18: mod_base = OTHER; note = 2'-O-methyladenosine-3'-phosphate
  modified_base 19: mod_base = OTHER; note = 2'-O-methylguanosine-3'-phosphate
  modified_base 20: mod_base = OTHER; note = 2'-deoxythymidine-3'-phosphorothioate
  misc_feature 1..19: note = RNA
  misc_feature 20..21: note = DNA
tgaaggccaatttccagagtt

SEQ ID NO: 545 - DNA, 21 bp, synthetic construct
  source 1..21: mol_type = other DNA
  modified_base 1: mod_base = OTHER; note = uridine-3'-phosphate
  modified_base 2: mod_base = OTHER; note = adenosine-3'-phosphate
  modified_base 3: mod_base = OTHER; note = 2'-O-methyluridine-3'-phosphate
  modified_base 4: mod_base = OTHER; note = uridine-3'-phosphate
  modified_base 5: mod_base = OTHER; note = adenosine-3'-phosphate
  modified_base 6: mod_base = OTHER; note = 2'-O-methyluridine-3'-phosphate
  modified_base 7: mod_base = OTHER; note = adenosine-3'-phosphate
  modified_base 8: mod_base = OTHER; note = adenosine-3'-phosphate
  modified_base 9: mod_base = OTHER; note = adenosine-3'-phosphate
  modified_base 10: mod_base = OTHER; note = adenosine-3'-phosphate
  modified_base 11: mod_base = OTHER; note = adenosine-3'-phosphate
  modified_base 12: mod_base = OTHER; note = 2'-O-methyluridine-3'-phosphate
  modified_base 13: mod_base = OTHER; note = adenosine-3'-phosphate
  modified_base 14: mod_base = OTHER; note = 2'-O-methyluridine-3'-phosphate
  modified_base 15: mod_base = OTHER; note = cytidine-3'-phosphate
  modified_base 16: mod_base = OTHER; note = 2'-O-methyluridine-3'-phosphate
  modified_base 17: mod_base = OTHER; note = 2'-O-methyluridine-3'-phosphate
  modified_base 18: mod_base = OTHER; note = 2'-O-methylguanosine-3'-phosphate
  modified_base 19: mod_base = OTHER; note = 2'-O-methylcytidine-3'-phosphate
  modified_base 20: mod_base = OTHER; note = 2'-deoxythymidine-3'-phosphorothioate
  misc_feature 1..19: note = RNA
  misc_feature 20..21: note = DNA
tattataaaaatatcttgctt

SEQ ID NO: 546 - DNA, 21 bp, synthetic construct
  source 1..21: mol_type = other DNA
  modified_base 1: mod_base = OTHER; note = uridine-3'-phosphate
  modified_base 2: mod_base = OTHER; note = guanosine-3'-phosphate
  modified_base 3: mod_base = OTHER; note = 2'-O-methyluridine-3'-phosphate
  modified_base 4: mod_base = OTHER; note = adenosine-3'-phosphate
  modified_base 5: mod_base = OTHER; note = cytidine-3'-phosphate
  modified_base 6: mod_base = OTHER; note = 2'-O-methyluridine-3'-phosphate
  modified_base 7: mod_base = OTHER; note = uridine-3'-phosphate
  modified_base 8: mod_base = OTHER; note = guanosine-3'-phosphate
  modified_base 9: mod_base = OTHER; note = adenosine-3'-phosphate
  modified_base 10: mod_base = OTHER; note = cytidine-3'-phosphate
  modified_base 11: mod_base = OTHER; note = adenosine-3'-phosphate
  modified_base 12: mod_base = OTHER; note = adenosine-3'-phosphate
  modified_base 13: mod_base = OTHER; note = adenosine-3'-phosphate
  modified_base 14: mod_base = OTHER; note = adenosine-3'-phosphate
  modified_base 15: mod_base = OTHER; note = adenosine-3'-phosphate
  modified_base 16: mod_base = OTHER; note = cytidine-3'-phosphate
  modified_base 17: mod_base = OTHER; note = 2'-O-methyladenosine-3'-phosphate
  modified_base 18: mod_base = OTHER; note = 2'-O-methyluridine-3'-phosphate
  modified_base 19: mod_base = OTHER; note = 2'-O-methyluridine-3'-phosphate
  modified_base 20: mod_base = OTHER; note = 2'-deoxythymidine-3'-phosphorothioate
  misc_feature 1..19: note = RNA
  misc_feature 20..21: note = DNA
tgtacttgacaaaaacatttt

SEQ ID NO: 547 - DNA, 21 bp, synthetic construct
  source 1..21: mol_type = other DNA
  modified_base 1: mod_base = OTHER; note = adenosine-3'-phosphate
  modified_base 2: mod_base = OTHER; note = adenosine-3'-phosphate
  modified_base 3: mod_base = OTHER; note = adenosine-3'-phosphate
  modified_base 4: mod_base = OTHER; note = guanosine-3'-phosphate
  modified_base 5: mod_base = OTHER; note = guanosine-3'-phosphate
  modified_base 6: mod_base = OTHER; note = 2'-O-methyluridine-3'-phosphate
  modified_base 7: mod_base = OTHER; note = adenosine-3'-phosphate
  modified_base 8: mod_base = OTHER; note = cytidine-3'-phosphate
  modified_base 9: mod_base = OTHER; note = 2'-O-methyluridine-3'-phosphate
  modified_base 10: mod_base = OTHER; note = uridine-3'-phosphate
  modified_base 11: mod_base = OTHER; note = guanosine-3'-phosphate
  modified_base 12: mod_base = OTHER; note = 2'-O-methyluridine-3'-phosphate
  modified_base 13: mod_base = OTHER; note = 2'-O-methyluridine-3'-phosphate
  modified_base 14: mod_base = OTHER; note = guanosine-3'-phosphate
  modified_base 15: mod_base = OTHER; note = 2'-O-methyluridine-3'-phosphate
  modified_base 16: mod_base = OTHER; note = 2'-O-methyluridine-3'-phosphate
  modified_base 17: mod_base = OTHER; note = 2'-O-methyluridine-3'-phosphate
  modified_base 18: mod_base = OTHER; note = 2'-O-methyladenosine-3'-phosphate
  modified_base 19: mod_base = OTHER; note = 2'-O-methyladenosine-3'-phosphate
  modified_base 20: mod_base = OTHER; note = 2'-deoxythymidine-3'-phosphorothioate
  misc_feature 1..19: note = RNA
  misc_feature 20..21: note = DNA
aaaggtacttgttgtttaatt

SEQ ID NO: 548 - DNA, 21 bp, synthetic construct
  source 1..21: mol_type = other DNA
  modified_base 1: mod_base = OTHER; note = uridine-3'-phosphate
  modified_base 2: mod_base = OTHER; note = cytidine-3'-phosphate
  modified_base 3: mod_base = OTHER; note = cytidine-3'-phosphate
  modified_base 4: mod_base = OTHER; note = 2'-O-methyluridine-3'-phosphate
  modified_base 5: mod_base = OTHER; note = uridine-3'-phosphate
  modified_base 6: mod_base = OTHER; note = cytidine-3'-phosphate
  modified_base 7: mod_base = OTHER; note = adenosine-3'-phosphate
  modified_base 8: mod_base = OTHER; note = cytidine-3'-phosphate
  modified_base 9: mod_base = OTHER; note = adenosine-3'-phosphate
  modified_base 10: mod_base = OTHER; note = guanosine-3'-phosphate
  modified_base 11: mod_base = OTHER; note = adenosine-3'-phosphate
  modified_base 12: mod_base = OTHER; note = cytidine-3'-phosphate
  modified_base 13: mod_base = OTHER; note = 2'-O-methyluridine-3'-phosphate
  modified_base 14: mod_base = OTHER; note = 2'-O-methyluridine-3'-phosphate
  modified_base 15: mod_base = OTHER; note = 2'-O-methyluridine-3'-phosphate
  modified_base 16: mod_base = OTHER; note = cytidine-3'-phosphate
  modified_base 17: mod_base = OTHER; note = 2'-O-methyluridine-3'-phosphate
  modified_base 18: mod_base = OTHER; note = 2'-O-methylguanosine-3'-phosphate
  modified_base 19: mod_base = OTHER; note = 2'-O-methyladenosine-3'-phosphate
  modified_base 20: mod_base = OTHER; note = 2'-deoxythymidine-3'-phosphorothioate
  misc_feature 1..19: note = RNA
  misc_feature 20..21: note = DNA
tccttcacagactttctgatt

SEQ ID NO: 549 - DNA, 21 bp, synthetic construct
  source 1..21: mol_type = other DNA
  modified_base 1: mod_base = OTHER; note = uridine-3'-phosphate
  modified_base 2: mod_base = OTHER; note = 2'-O-methyluridine-3'-phosphate
  modified_base 3: mod_base = OTHER; note = guanosine-3'-phosphate
  modified_base 4: mod_base = OTHER; note = cytidine-3'-phosphate
  modified_base 5: mod_base = OTHER; note = adenosine-3'-phosphate
  modified_base 6: mod_base = OTHER; note = uridine-3'-phosphate
  modified_base 7: mod_base = OTHER; note = cytidine-3'-phosphate
  modified_base 8: mod_base = OTHER; note = adenosine-3'-phosphate
  modified_base 9: mod_base = OTHER; note = adenosine-3'-phosphate
  modified_base 10: mod_base = OTHER; note = adenosine-3'-phosphate
  modified_base 11: mod_base = OTHER; note = 2'-O-methyluridine-3'-phosphate
  modified_base 12: mod_base = OTHER; note = guanosine-3'-phosphate
  modified_base 13: mod_base = OTHER; note = cytidine-3'-phosphate
  modified_base 14: mod_base = OTHER; note = 2'-O-methyluridine-3'-phosphate
  modified_base 15: mod_base = OTHER; note = 2'-O-methyluridine-3'-phosphate
  modified_base 16: mod_base = OTHER; note = cytidine-3'-phosphate
  modified_base 17: mod_base = OTHER; note = 2'-O-methyladenosine-3'-phosphate
  modified_base 18: mod_base = OTHER; note = 2'-O-methylguanosine-3'-phosphate
  modified_base 19: mod_base = OTHER; note = 2'-O-methyluridine-3'-phosphate
  modified_base 20: mod_base = OTHER; note = 2'-deoxythymidine-3'-phosphorothioate
  misc_feature 1..19: note = RNA
  misc_feature 20..21: note = DNA
ttgcatcaaatgcttcagttt

SEQ ID NO: 550 - DNA, 21 bp, synthetic construct
  source 1..21: mol_type = other DNA
  modified_base 1: mod_base = OTHER; note = guanosine-3'-phosphate
  modified_base 2: mod_base = OTHER; note = adenosine-3'-phosphate
  modified_base 3: mod_base = OTHER; note = cytidine-3'-phosphate
  modified_base 4: mod_base = OTHER; note = adenosine-3'-phosphate
  modified_base 5: mod_base = OTHER; note = 2'-O-methyluridine-3'-phosphate
  modified_base 6: mod_base = OTHER; note = uridine-3'-phosphate
  modified_base 7: mod_base = OTHER; note = 2'-O-methyluridine-3'-phosphate
  modified_base 8: mod_base = OTHER; note = uridine-3'-phosphate
  modified_base 9: mod_base = OTHER; note = adenosine-3'-phosphate
  modified_base 10: mod_base = OTHER; note = adenosine-3'-phosphate
  modified_base 11: mod_base = OTHER; note = cytidine-3'-phosphate
  modified_base 12: mod_base = OTHER; note = adenosine-3'-phosphate
  modified_base 13: mod_base = OTHER; note = cytidine-3'-phosphate
  modified_base 14: mod_base = OTHER; note = adenosine-3'-phosphate
  modified_base 15: mod_base = OTHER; note = guanosine-3'-phosphate
  modified_base 16: mod_base = OTHER; note = adenosine-3'-phosphate
  modified_base 17: mod_base = OTHER; note = 2'-O-methyladenosine-3'-phosphate
  modified_base 18: mod_base = OTHER; note = 2'-O-methylcytidine-3'-phosphate
  modified_base 19: mod_base = OTHER; note = 2'-O-methyluridine-3'-phosphate
  modified_base 20: mod_base = OTHER; note = 2'-deoxythymidine-3'-phosphorothioate
  misc_feature 1..19: note = RNA
  misc_feature 20..21: note = DNA
gacattttaacacagaacttt

SEQ ID NO: 551 - RNA, 21 nt, synthetic construct
  source 1..21: mol_type = other RNA
  modified_base 1: mod_base = OTHER; note = 2'-deoxy-2'-fluoroguanosine-3'-phosphorothioate
  modified_base 2: mod_base = OTHER; note = 2'-O-methyladenosine-3'-phosphorothioate
  modified_base 3: mod_base = OTHER; note = 2'-deoxy-2'-fluorocytidine-3'-phosphate
  modified_base 4: mod_base = OTHER; note = 2'-O-methyladenosine-3'-phosphate
  modified_base 5: mod_base = OTHER; note = 2'-deoxy-2'-fluoroadenosine-3'-phosphate
  modified_base 6: mod_base = OTHER; note = 2'-O-methyladenosine-3'-phosphate
  modified_base 7: mod_base = OTHER; note = 2'-deoxy-2'-fluoroadenosine-3'-phosphate
  modified_base 8: mod_base = OTHER; note = 2'-O-methyluridine-3'-phosphate
  modified_base 9: mod_base = OTHER; note = 2'-deoxy-2'-fluoroadenosine-3'-phosphate
  modified_base 10: mod_base = OTHER; note = 2'-deoxy-2'-fluoroadenosine-3'-phosphate
  modified_base 11: mod_base = OTHER; note = 2'-deoxy-2'-fluorocytidine-3'-phosphate
  modified_base 12: mod_base = OTHER; note = 2'-O-methyluridine-3'-phosphate
  modified_base 13: mod_base = OTHER; note = 2'-deoxy-2'-fluorocytidine-3'-phosphate
  modified_base 14: mod_base = OTHER; note = 2'-O-methyladenosine-3'-phosphate
  modified_base 15: mod_base = OTHER; note = 2'-deoxy-2'-fluorocytidine-3'-phosphate
  modified_base 16: mod_base = OTHER; note = 2'-O-methyluridine-3'-phosphate
  modified_base 17: mod_base = OTHER; note = 2'-deoxy-2'-fluoroadenosine-3'-phosphate
  modified_base 18: mod_base = OTHER; note = 2'-O-methyluridine-3'-phosphate
  modified_base 19: mod_base = OTHER; note = 2'-deoxy-2'-fluoroadenosine-3'-phosphate
  modified_base 20: mod_base = OTHER; note = 2'-O-methyladenosine-3'-phosphate
  modified_base 21: mod_base = OTHER; note = 2'-deoxy-2'-fluorouridine-3'-phosphate ((2S,4R)-1-[29-[[2-(acetylamino)-2-deoxy-beta-D-galactopyra nosyl]oxy]-14,14-bis[[3-[[3-[[5-[[2-(acetylamino)-2-deoxy-b eta-D-galactopyranosyl]oxy]-1-oxopentyl]amino]propyl]amino] -3-oxopropoxy]methyl]-1,12,19,25-tetraoxo-16-oxa-13,20,24-t riazanonacos-1-yl]-4-hydroxy-2-pyrrolidinyl)methyl ester
gacaaaataactcactataat

SEQ ID NO: 552 - RNA, 21 nt, synthetic construct
  source 1..21: mol_type = other RNA
  modified_base 1: mod_base = OTHER; note = 2'-deoxy-2'-fluoroguanosine-3'-phosphate
  modified_base 2: mod_base = OTHER; note = 2'-O-methyladenosine-3'-phosphate
  modified_base 3: mod_base = OTHER; note = 2'-deoxy-2'-fluorocytidine-3'-phosphate
  modified_base 4: mod_base = OTHER; note = 2'-O-methyladenosine-3'-phosphate
  modified_base 5: mod_base = OTHER; note = 2'-deoxy-2'-fluoroadenosine-3'-phosphate
  modified_base 6: mod_base = OTHER; note = 2'-O-methyladenosine-3'-phosphate
  modified_base 7: mod_base = OTHER; note = 2'-deoxy-2'-fluoroadenosine-3'-phosphate
  modified_base 8: mod_base = OTHER; note = 2'-O-methyluridine-3'-phosphate
  modified_base 9: mod_base = OTHER; note = 2'-deoxy-2'-fluoroadenosine-3'-phosphate
  modified_base 10: mod_base = OTHER; note = 2'-deoxy-2'-fluoroadenosine-3'-phosphate
  modified_base 11: mod_base = OTHER; note = 2'-deoxy-2'-fluorocytidine-3'-phosphate
  modified_base 12: mod_base = OTHER; note = 2'-O-methyluridine-3'-phosphate
  modified_base 13: mod_base = OTHER; note = 2'-deoxy-2'-fluorocytidine-3'-phosphate
  modified_base 14: mod_base = OTHER; note = 2'-O-methyladenosine-3'-phosphate
  modified_base 15: mod_base = OTHER; note = 2'-deoxy-2'-fluorocytidine-3'-phosphate
  modified_base 16: mod_base = OTHER; note = 2'-O-methyluridine-3'-phosphate
  modified_base 17: mod_base = OTHER; note = 2'-deoxy-2'-fluoroadenosine-3'-phosphate
  modified_base 18: mod_base = OTHER; note = 2'-O-methyluridine-3'-phosphate
  modified_base 19: mod_base = OTHER; note = 2'-deoxy-2'-fluoroadenosine-3'-phosphate
  modified_base 20: mod_base = OTHER; note = 2'-O-methyladenosine-3'-phosphate
  modified_base 21: mod_base = OTHER; note = 2'-deoxy-2'-fluorouridine-3'-phosphate ((2S,4R)-1-[29-[[2-(acetylamino)-2-deoxy-beta-D-galactopyra nosyl]oxy]-14,14-bis[[3-[[3-[[5-[[2-(acetylamino)-2-deoxy-b eta-D-galactopyranosyl]oxy]-1-oxopentyl]amino]propyl]amino] -3-oxopropoxy]methyl]-1,12,19,25-tetraoxo-16-oxa-13,20,24-t riazanonacos-1-yl]-4-hydroxy-2-pyrrolidinyl)methyl ester
gacaaaataactcactataat

SEQ ID NO: 553 - RNA, 21 nt, synthetic construct
  source 1..21: mol_type = other RNA
  modified_base 1: mod_base = OTHER; note = 2'-deoxy-2'-fluorocytidine-3'-phosphorothioate
  modified_base 2: mod_base = OTHER; note = 2'-O-methyladenosine-3'-phosphorothioate
  modified_base 3: mod_base = OTHER; note = 2'-deoxy-2'-fluoroguanosine-3'-phosphate
  modified_base 4: mod_base = OTHER; note = 2'-O-methyladenosine-3'-phosphate
  modified_base 5: mod_base = OTHER; note = 2'-deoxy-2'-fluorouridine-3'-phosphate
  modified_base 6: mod_base = OTHER; note = 2'-O-methylcytidine-3'-phosphate
  modified_base 7: mod_base = OTHER; note = 2'-deoxy-2'-fluoroadenosine-3'-phosphate
  modified_base 8: mod_base = OTHER; note = 2'-O-methyladenosine-3'-phosphate
  modified_base 9: mod_base = OTHER; note = 2'-deoxy-2'-fluoroadenosine-3'-phosphate
  modified_base 10: mod_base = OTHER; note = 2'-deoxy-2'-fluorocytidine-3'-phosphate
  modified_base 11: mod_base = OTHER; note = 2'-deoxy-2'-fluoroadenosine-3'-phosphate
  modified_base 12: mod_base = OTHER; note = 2'-O-methylcytidine-3'-phosphate
  modified_base 13: mod_base = OTHER; note = 2'-deoxy-2'-fluoroadenosine-3'-phosphate
  modified_base 14: mod_base = OTHER; note = 2'-O-methyladenosine-3'-phosphate
  modified_base 15: mod_base = OTHER; note = 2'-deoxy-2'-fluorouridine-3'-phosphate
  modified_base 16: mod_base = OTHER; note = 2'-O-methyluridine-3'-phosphate
  modified_base 17: mod_base = OTHER; note = 2'-deoxy-2'-fluorouridine-3'-phosphate
  modified_base 18: mod_base = OTHER; note = 2'-O-methylcytidine-3'-phosphate
  modified_base 19: mod_base = OTHER; note = 2'-deoxy-2'-fluoroadenosine-3'-phosphate
  modified_base 20: mod_base = OTHER; note = 2'-O-methylguanosine-3'-phosphate
  modified_base 21: mod_base = OTHER; note = 2'-deoxy-2'-fluorouridine-3'-phosphate ((2S,4R)-1-[29-[[2-(acetylamino)-2-deoxy-beta-D-galactopyra nosyl]oxy]-14,14-bis[[3-[[3-[[5-[[2-(acetylamino)-2-deoxy-b eta-D-galactopyranosyl]oxy]-1-oxopentyl]amino]propyl]amino] -3-oxopropoxy]methyl]-1,12,19,25-tetraoxo-16-oxa-13,20,24-t riazanonacos-1-yl]-4-hydroxy-2-pyrrolidinyl)methyl ester
cagatcaaacacaatttcagt

SEQ ID NO: 554 - RNA, 21 nt, synthetic construct
  source 1..21: mol_type = other RNA
  modified_base 1: mod_base = OTHER; note = 2'-deoxy-2'-fluorocytidine-3'-phosphate
  modified_base 2: mod_base = OTHER; note = 2'-O-methyladenosine-3'-phosphate
  modified_base 3: mod_base = OTHER; note = 2'-deoxy-2'-fluoroguanosine-3'-phosphate
  modified_base 4: mod_base = OTHER; note = 2'-O-methyladenosine-3'-phosphate
  modified_base 5: mod_base = OTHER; note = 2'-deoxy-2'-fluorouridine-3'-phosphate
  modified_base 6: mod_base = OTHER; note = 2'-O-methylcytidine-3'-phosphate
  modified_base 7: mod_base = OTHER; note = 2'-deoxy-2'-fluoroadenosine-3'-phosphate
  modified_base 8: mod_base = OTHER; note = 2'-O-methyladenosine-3'-phosphate
  modified_base 9: mod_base = OTHER; note = 2'-deoxy-2'-fluoroadenosine-3'-phosphate
  modified_base 10: mod_base = OTHER; note = 2'-deoxy-2'-fluorocytidine-3'-phosphate
  modified_base 11: mod_base = OTHER; note = 2'-deoxy-2'-fluoroadenosine-3'-phosphate
  modified_base 12: mod_base = OTHER; note = 2'-O-methylcytidine-3'-phosphate
  modified_base 13: mod_base = OTHER; note = 2'-deoxy-2'-fluoroadenosine-3'-phosphate
  modified_base 14: mod_base = OTHER; note = 2'-O-methyladenosine-3'-phosphate
  modified_base 15: mod_base = OTHER; note = 2'-deoxy-2'-fluorouridine-3'-phosphate
  modified_base 16: mod_base = OTHER; note = 2'-O-methyluridine-3'-phosphate
  modified_base 17: mod_base = OTHER; note = 2'-deoxy-2'-fluorouridine-3'-phosphate
  modified_base 18: mod_base = OTHER; note = 2'-O-methylcytidine-3'-phosphate
  modified_base 19: mod_base = OTHER; note = 2'-deoxy-2'-fluoroadenosine-3'-phosphate
  modified_base 20: mod_base = OTHER; note = 2'-O-methylguanosine-3'-phosphate
  modified_base 21: mod_base = OTHER; note = 2'-deoxy-2'-fluorouridine-3'-phosphate ((2S,4R)-1-[29-[[2-(acetylamino)-2-deoxy-beta-D-galactopyra nosyl]oxy]-14,14-bis[[3-[[3-[[5-[[2-(acetylamino)-2-deoxy-b eta-D-galactopyranosyl]oxy]-1-oxopentyl]amino]propyl]amino] -3-oxopropoxy]methyl]-1,12,19,25-tetraoxo-16-oxa-13,20,24-t riazanonacos-1-yl]-4-hydroxy-2-pyrrolidinyl)methyl ester
cagatcaaacacaatttcagt

SEQ ID NO: 555 - RNA, 23 nt, synthetic construct
  source 1..23: mol_type = other RNA
  modified_base 1: mod_base = OTHER; note = 2'-O-methyladenosine-3'-phosphorothioate
  modified_base 2: mod_base = OTHER; note = 2'-deoxy-2'-fluorouridine-3'-phosphorothioate
  modified_base 3: mod_base = OTHER; note = 2'-O-methyluridine-3'-phosphate
  modified_base 4: mod_base = OTHER; note = 2'-deoxy-2'-fluoroadenosine-3'-phosphate
  modified_base 5: mod_base = OTHER; note = 2'-O-methyluridine-3'-phosphate
  modified_base 6: mod_base = OTHER; note = 2'-deoxy-2'-fluoroadenosine-3'-phosphate
  modified_base 7: mod_base = OTHER; note = 2'-O-methylguanosine-3'-phosphate
  modified_base 8: mod_base = OTHER; note = 2'-deoxy-2'-fluorouridine-3'-phosphate
  modified_base 9: mod_base = OTHER; note = 2'-O-methylguanosine-3'-phosphate
  modified_base 10: mod_base = OTHER; note = 2'-deoxy-2'-fluoroadenosine-3'-phosphate
  modified_base 11: mod_base = OTHER; note = 2'-O-methylguanosine-3'-phosphate
  modified_base 12: mod_base = OTHER; note = 2'-O-methyluridine-3'-phosphate
  modified_base 13: mod_base = OTHER; note = 2'-O-methyluridine-3'-phosphate
  modified_base 14: mod_base = OTHER; note = 2'-deoxy-2'-fluoroadenosine-3'-phosphate
  modified_base 15: mod_base = OTHER; note = 2'-O-methyluridine-3'-phosphate
  modified_base 16: mod_base = OTHER; note = 2'-deoxy-2'-fluorouridine-3'-phosphate
  modified_base 17: mod_base = OTHER; note = 2'-O-methyluridine-3'-phosphate
  modified_base 18: mod_base = OTHER; note = 2'-deoxy-2'-fluorouridine-3'-phosphate
  modified_base 19: mod_base = OTHER; note = 2'-O-methylguanosine-3'-phosphate
  modified_base 20: mod_base = OTHER; note = 2'-deoxy-2'-fluorouridine-3'-phosphate
  modified_base 21: mod_base = OTHER; note = 2'-O-methylcytidine-3'-phosphorothioate
  modified_base 22: mod_base = OTHER; note = 2'-O-methyladenosine-3'-phosphorothioate
  modified_base 23: mod_base = OTHER; note = 2'-O-methyladenosine
attatagtgagttattttgtcaa

SEQ ID NO: 556 - RNA, 23 nt, synthetic construct
  source 1..23: mol_type = other RNA
  modified_base 1: mod_base = OTHER; note = 2'-O-methyladenosine-3'-phosphate
  modified_base 2: mod_base = OTHER; note = 2'-deoxy-2'-fluorouridine-3'-phosphate
  modified_base 3: mod_base = OTHER; note = 2'-O-methyluridine-3'-phosphate
  modified_base 4: mod_base = OTHER; note = 2'-deoxy-2'-fluoroadenosine-3'-phosphate
  modified_base 5: mod_base = OTHER; note = 2'-O-methyluridine-3'-phosphate
  modified_base 6: mod_base = OTHER; note = 2'-deoxy-2'-fluoroadenosine-3'-phosphate
  modified_base 7: mod_base = OTHER; note = 2'-O-methylguanosine-3'-phosphate
  modified_base 8: mod_base = OTHER; note = 2'-deoxy-2'-fluorouridine-3'-phosphate
  modified_base 9: mod_base = OTHER; note = 2'-O-methylguanosine-3'-phosphate
  modified_base 10: mod_base = OTHER; note = 2'-deoxy-2'-fluoroadenosine-3'-phosphate
  modified_base 11: mod_base = OTHER; note = 2'-O-methylguanosine-3'-phosphate
  modified_base 12: mod_base = OTHER; note = 2'-O-methyluridine-3'-phosphate
  modified_base 13: mod_base = OTHER; note = 2'-O-methyluridine-3'-phosphate
  modified_base 14: mod_base = OTHER; note = 2'-deoxy-2'-fluoroadenosine-3'-phosphate
  modified_base 15: mod_base = OTHER; note = 2'-O-methyluridine-3'-phosphate
  modified_base 16: mod_base = OTHER; note = 2'-deoxy-2'-fluorouridine-3'-phosphate
  modified_base 17: mod_base = OTHER; note = 2'-O-methyluridine-3'-phosphate
  modified_base 18: mod_base = OTHER; note = 2'-deoxy-2'-fluorouridine-3'-phosphate
  modified_base 19: mod_base = OTHER; note = 2'-O-methylguanosine-3'-phosphate
  modified_base 20: mod_base = OTHER; note = 2'-deoxy-2'-fluorouridine-3'-phosphate
  modified_base 21: mod_base = OTHER; note = 2'-O-methylcytidine-3'-phosphorothioate
  modified_base 22: mod_base = OTHER; note = 2'-deoxy-2'-fluoroadenosine-3'-phosphorothioate
  modified_base 23: mod_base = OTHER; note = 2'-O-methyladenosine
attatagtgagttattttgtcaa

SEQ ID NO: 557 - RNA, 23 nt, synthetic construct
  source 1..23: mol_type = other RNA
  modified_base 1: mod_base = OTHER; note = 2'-O-methyladenosine-3'-phosphorothioate
  modified_base 2: mod_base = OTHER; note = 2'-deoxy-2'-fluorocytidine-3'-phosphorothioate
  modified_base 3: mod_base = OTHER; note = 2'-O-methyluridine-3'-phosphate
  modified_base 4: mod_base = OTHER; note = 2'-deoxy-2'-fluoroguanosine-3'-phosphate
  modified_base 5: mod_base = OTHER; note = 2'-O-methyladenosine-3'-phosphate
  modified_base 6: mod_base = OTHER; note = 2'-deoxy-2'-fluoroadenosine-3'-phosphate
  modified_base 7: mod_base = OTHER; note = 2'-O-methyladenosine-3'-phosphate
  modified_base 8: mod_base = OTHER; note = 2'-deoxy-2'-fluorouridine-3'-phosphate
  modified_base 9: mod_base = OTHER; note = 2'-O-methyluridine-3'-phosphate
  modified_base 10: mod_base = OTHER; note = 2'-deoxy-2'-fluoroguanosine-3'-phosphate
  modified_base 11: mod_base = OTHER; note = 2'-O-methyluridine-3'-phosphate
  modified_base 12: mod_base = OTHER; note = 2'-O-methylguanosine-3'-phosphate
  modified_base 13: mod_base = OTHER; note = 2'-O-methyluridine-3'-phosphate
  modified_base 14: mod_base = OTHER; note = 2'-deoxy-2'-fluorouridine-3'-phosphate
  modified_base 15: mod_base = OTHER; note = 2'-O-methyluridine-3'-phosphate
  modified_base 16: mod_base = OTHER; note = 2'-deoxy-2'-fluoroguanosine-3'-phosphate
  modified_base 17: mod_base = OTHER; note = 2'-O-methyladenosine-3'-phosphate
  modified_base 18: mod_base = OTHER; note = 2'-deoxy-2'-fluorouridine-3'-phosphate
  modified_base 19: mod_base = OTHER; note = 2'-O-methylcytidine-3'-phosphate
  modified_base 20: mod_base = OTHER; note = 2'-deoxy-2'-fluorouridine-3'-phosphate
  modified_base 21: mod_base = OTHER; note = 2'-O-methylguanosine-3'-phosphorothioate
  modified_base 22: mod_base = OTHER; note = 2'-O-methylcytidine-3'-phosphorothioate
  modified_base 23: mod_base = OTHER; note = 2'-O-methyladenosine
actgaaattgtgtttgatctgca

SEQ ID NO: 558 - RNA, 23 nt, synthetic construct
  source 1..23: mol_type = other RNA
  modified_base 1: mod_base = OTHER; note = 2'-O-methyladenosine-3'-phosphate
  modified_base 2: mod_base = OTHER; note = 2'-deoxy-2'-fluorocytidine-3'-phosphate
  modified_base 3: mod_base = OTHER; note = 2'-O-methyluridine-3'-phosphate
  modified_base 4: mod_base = OTHER; note = 2'-deoxy-2'-fluoroguanosine-3'-phosphate
  modified_base 5: mod_base = OTHER; note = 2'-O-methyladenosine-3'-phosphate
  modified_base 6: mod_base = OTHER; note = 2'-deoxy-2'-fluoroadenosine-3'-phosphate
  modified_base 7: mod_base = OTHER; note = 2'-O-methyladenosine-3'-phosphate
  modified_base 8: mod_base = OTHER; note = 2'-deoxy-2'-fluorouridine-3'-phosphate
  modified_base 9: mod_base = OTHER; note = 2'-O-methyluridine-3'-phosphate
  modified_base 10: mod_base = OTHER; note = 2'-deoxy-2'-fluoroguanosine-3'-phosphate
  modified_base 11: mod_base = OTHER; note = 2'-O-methyluridine-3'-phosphate
  modified_base 12: mod_base = OTHER; note = 2'-O-methylguanosine-3'-phosphate
  modified_base 13: mod_base = OTHER; note = 2'-O-methyluridine-3'-phosphate
  modified_base 14: mod_base = OTHER; note = 2'-deoxy-2'-fluorouridine-3'-phosphate
  modified_base 15: mod_base = OTHER; note = 2'-O-methyluridine-3'-phosphate
  modified_base 16: mod_base = OTHER; note = 2'-deoxy-2'-fluoroguanosine-3'-phosphate
  modified_base 17: mod_base = OTHER; note = 2'-O-methyladenosine-3'-phosphate
  modified_base 18: mod_base = OTHER; note = 2'-deoxy-2'-fluorouridine-3'-phosphate
  modified_base 19: mod_base = OTHER; note = 2'-O-methylcytidine-3'-phosphate
  modified_base 20: mod_base = OTHER; note = 2'-deoxy-2'-fluorouridine-3'-phosphate
  modified_base 21: mod_base = OTHER; note = 2'-O-methylguanosine-3'-phosphorothioate
  modified_base 22: mod_base = OTHER; note = 2'-deoxy-2'-fluorocytidine-3'-phosphorothioate
  modified_base 23: mod_base = OTHER; note = 2'-O-methyladenosine
actgaaattgtgtttgatctgca

SEQ ID NO: 559 - RNA, 21 nt, synthetic construct
  source 1..21: mol_type = other RNA
  modified_base 1: mod_base = OTHER; note = 2'-deoxy-2'-fluoroadenosine-3'-phosphate
  modified_base 2: mod_base = OTHER; note = 2'-O-methyluridine-3'-phosphate
  modified_base 3: mod_base = OTHER; note = 2'-deoxy-2'-fluorouridine-3'-phosphate
  modified_base 4: mod_base = OTHER; note = 2'-O-methyluridine-3'-phosphate
  modified_base 5: mod_base = OTHER; note = 2'-deoxy-2'-fluoroadenosine-3'-phosphate
  modified_base 6: mod_base = OTHER; note = 2'-O-methyladenosine-3'-phosphate
  modified_base 7: mod_base = OTHER; note = 2'-deoxy-2'-fluoroadenosine-3'-phosphate
  modified_base 8: mod_base = OTHER; note = 2'-O-methylcytidine-3'-phosphate
  modified_base 9: mod_base = OTHER; note = 2'-deoxy-2'-fluoroadenosine-3'-phosphate
  modified_base 10: mod_base = OTHER; note = 2'-deoxy-2'-fluoroadenosine-3'-phosphate
  modified_base 11: mod_base = OTHER; note = 2'-deoxy-2'-fluorocytidine-3'-phosphate
  modified_base 12: mod_base = OTHER; note = 2'-O-methyladenosine-3'-phosphate
  modified_base 13: mod_base = OTHER; note = 2'-deoxy-2'-fluoroadenosine-3'-phosphate
  modified_base 14: mod_base = OTHER; note = 2'-O-methylguanosine-3'-phosphate
  modified_base 15: mod_base = OTHER; note = 2'-deoxy-2'-fluorouridine-3'-phosphate
  modified_base 16: mod_base = OTHER; note = 2'-O-methyladenosine-3'-phosphate
  modified_base 17: mod_base = OTHER; note = 2'-deoxy-2'-fluorocytidine-3'-phosphate
  modified_base 18: mod_base = OTHER; note = 2'-O-methylcytidine-3'-phosphate
  modified_base 19: mod_base = OTHER; note = 2'-deoxy-2'-fluorouridine-3'-phosphate
  modified_base 20: mod_base = OTHER; note = 2'-O-methyluridine-3'-phosphate
  modified_base 21: mod_base = OTHER; note = 2'-deoxy-2'-fluorouridine-3'-phosphate ((2S,4R)-1-[29-[[2-(acetylamino)-2-deoxy-beta-D-galactopyra nosyl]oxy]-14,14-bis[[3-[[3-[[5-[[2-(acetylamino)-2-deoxy-b eta-D-galactopyranosyl]oxy]-1-oxopentyl]amino]propyl]amino] -3-oxopropoxy]methyl]-1,12,19,25-tetraoxo-16-oxa-13,20,24-t riazanonacos-1-yl]-4-hydroxy-2-pyrrolidinyl)methyl ester
atttaaacaacaagtaccttt

SEQ ID NO: 560 - RNA, 21 nt, synthetic construct
  source 1..21: mol_type = other RNA
  modified_base 1: mod_base = OTHER; note = 2'-deoxy-2'-fluoroadenosine-3'-phosphorothioate
  modified_base 2: mod_base = OTHER; note = 2'-O-methyluridine-3'-phosphorothioate
  modified_base 3: mod_base = OTHER; note = 2'-deoxy-2'-fluorouridine-3'-phosphate
  modified_base 4: mod_base = OTHER; note = 2'-O-methyluridine-3'-phosphate
  modified_base 5: mod_base = OTHER; note = 2'-deoxy-2'-fluoroadenosine-3'-phosphate
  modified_base 6: mod_base = OTHER; note = 2'-O-methyladenosine-3'-phosphate
  modified_base 7: mod_base = OTHER; note = 2'-deoxy-2'-fluoroadenosine-3'-phosphate
  modified_base 8: mod_base = OTHER; note = 2'-O-methylcytidine-3'-phosphate
  modified_base 9: mod_base = OTHER; note = 2'-deoxy-2'-fluoroadenosine-3'-phosphate
  modified_base 10: mod_base = OTHER; note = 2'-deoxy-2'-fluoroadenosine-3'-phosphate
  modified_base 11: mod_base = OTHER; note = 2'-deoxy-2'-fluorocytidine-3'-phosphate
  modified_base 12: mod_base = OTHER; note = 2'-O-methyladenosine-3'-phosphate
  modified_base 13: mod_base = OTHER; note = 2'-deoxy-2'-fluoroadenosine-3'-phosphate
  modified_base 14: mod_base = OTHER; note = 2'-O-methylguanosine-3'-phosphate
  modified_base 15: mod_base = OTHER; note = 2'-deoxy-2'-fluorouridine-3'-phosphate
  modified_base 16: mod_base = OTHER; note = 2'-O-methyladenosine-3'-phosphate
  modified_base 17: mod_base = OTHER; note = 2'-deoxy-2'-fluorocytidine-3'-phosphate
  modified_base 18: mod_base = OTHER; note = 2'-O-methylcytidine-3'-phosphate
  modified_base 19: mod_base = OTHER; note = 2'-deoxy-2'-fluorouridine-3'-phosphate
  modified_base 20: mod_base = OTHER; note = 2'-O-methyluridine-3'-phosphate
  modified_base 21: mod_base = OTHER; note = 2'-deoxy-2'-fluorouridine-3'-phosphate ((2S,4R)-1-[29-[[2-(acetylamino)-2-deoxy-beta-D-galactopyra nosyl]oxy]-14,14-bis[[3-[[3-[[5-[[2-(acetylamino)-2-deoxy-b eta-D-galactopyranosyl]oxy]-1-oxopentyl]amino]propyl]amino] -3-oxopropoxy]methyl]-1,12,19,25-tetraoxo-16-oxa-13,20,24-t riazanonacos-1-yl]-4-hydroxy-2-pyrrolidinyl)methyl ester
atttaaacaacaagtaccttt

SEQ ID NO: 561 - RNA, 21 nt, synthetic construct
  source 1..21: mol_type = other RNA
  modified_base 1: mod_base = OTHER; note = 2'-deoxy-2'-fluoroadenosine-3'-phosphorothioate
  modified_base 2: mod_base = OTHER; note = 2'-O-methyluridine-3'-phosphorothioate
  modified_base 3: mod_base = OTHER; note = 2'-deoxy-2'-fluorouridine-3'-phosphate
  modified_base 4: mod_base = OTHER; note = 2'-O-methyluridine-3'-phosphate
  modified_base 5: mod_base = OTHER; note = 2'-deoxy-2'-fluoroadenosine-3'-phosphate
  modified_base 6: mod_base = OTHER; note = 2'-O-methyladenosine-3'-phosphate
  modified_base 7: mod_base = OTHER; note = 2'-deoxy-2'-fluoroadenosine-3'-phosphate
  modified_base 8: mod_base = OTHER; note = 2'-O-methylcytidine-3'-phosphate
  modified_base 9: mod_base = OTHER; note = 2'-deoxy-2'-fluoroadenosine-3'-phosphate
  modified_base 10: mod_base = OTHER; note = 2'-deoxy-2'-fluoroadenosine-3'-phosphate
  modified_base 11: mod_base = OTHER; note = 2'-deoxy-2'-fluorocytidine-3'-phosphate
  modified_base 12: mod_base = OTHER; note = 2'-O-methyladenosine-3'-phosphate
  modified_base 13: mod_base = OTHER; note = 2'-deoxy-2'-fluoroadenosine-3'-phosphate
  modified_base 14: mod_base = OTHER; note = 2'-O-methylguanosine-3'-phosphate
  modified_base 15: mod_base = OTHER; note = 2'-deoxy-2'-fluorouridine-3'-phosphate
  modified_base 16: mod_base = OTHER; note = 2'-O-methyladenosine-3'-phosphate
  modified_base 17: mod_base = OTHER; note = 2'-deoxy-2'-fluorocytidine-3'-phosphate
  modified_base 18: mod_base = OTHER; note = 2'-O-methylcytidine-3'-phosphate
  modified_base 19: mod_base = OTHER; note = 2'-deoxy-2'-fluorouridine-3'-phosphate
  modified_base 20: mod_base = OTHER; note = 2'-O-methyluridine-3'-phosphate
  modified_base 21: mod_base = OTHER; note = 2'-deoxy-2'-fluorouridine-3'-phosphate ((2S,4R)-1-[29-[[2-(acetylamino)-2-deoxy-beta-D-galactopyra nosyl]oxy]-14,14-bis[[3-[[3-[[5-[[2-(acetylamino)-2-deoxy-b eta-D-galactopyranosyl]oxy]-1-oxopentyl]amino]propyl]amino] -3-oxopropoxy]methyl]-1,12,19,25-tetraoxo-16-oxa-13,20,24-t riazanonacos-1-yl]-4-hydroxy-2-pyrrolidinyl)methyl ester
atttaaacaacaagtaccttt

SEQ ID NO: 562 - RNA, 21 nt, synthetic construct
  source 1..21: mol_type = other RNA
  modified_base 1: mod_base = OTHER; note = 2'-deoxy-2'-fluorouridine-3'-phosphate
  modified_base 2: mod_base = OTHER; note = 2'-O-methylguanosine-3'-phosphate
  modified_base 3: mod_base = OTHER; note = 2'-deoxy-2'-fluoroadenosine-3'-phosphate
  modified_base 4: mod_base = OTHER; note = 2'-O-methylcytidine-3'-phosphate
  modified_base 5: mod_base = OTHER; note = 2'-deoxy-2'-fluoroadenosine-3'-phosphate
  modified_base 6: mod_base = OTHER; note = 2'-O-methyladenosine-3'-phosphate
  modified_base 7: mod_base = OTHER; note = 2'-deoxy-2'-fluoroadenosine-3'-phosphate
  modified_base 8: mod_base = OTHER; note = 2'-O-methyladenosine-3'-phosphate
  modified_base 9: mod_base = OTHER; note = 2'-deoxy-2'-fluorouridine-3'-phosphate
  modified_base 10: mod_base = OTHER; note = 2'-deoxy-2'-fluoroadenosine-3'-phosphate
  modified_base 11: mod_base = OTHER; note = 2'-deoxy-2'-fluoroadenosine-3'-phosphate
  modified_base 12: mod_base = OTHER; note = 2'-O-methylcytidine-3'-phosphate
  modified_base 13: mod_base = OTHER; note = 2'-deoxy-2'-fluorouridine-3'-phosphate
  modified_base 14: mod_base = OTHER; note = 2'-O-methylcytidine-3'-phosphate
  modified_base 15: mod_base = OTHER; note = 2'-deoxy-2'-fluoroadenosine-3'-phosphate
  modified_base 16: mod_base = OTHER; note = 2'-O-methylcytidine-3'-phosphate
  modified_base 17: mod_base = OTHER; note = 2'-deoxy-2'-fluorouridine-3'-phosphate
  modified_base 18: mod_base = OTHER; note = 2'-O-methyladenosine-3'-phosphate
  modified_base 19: mod_base = OTHER; note = 2'-deoxy-2'-fluorouridine-3'-phosphate
  modified_base 20: mod_base = OTHER; note = 2'-O-methyladenosine-3'-phosphate
  modified_base 21: mod_base = OTHER; note = 2'-deoxy-2'-fluoroadenosine-3'-phosphate ((2S,4R)-1-[29-[[2-(acetylamino)-2-deoxy-beta-D-galactopyra nosyl]oxy]-14,14-bis[[3-[[3-[[5-[[2-(acetylamino)-2-deoxy-b eta-D-galactopyranosyl]oxy]-1-oxopentyl]amino]propyl]amino] -3-oxopropoxy]methyl]-1,12,19,25-tetraoxo-16-oxa-13,20,24-t riazanonacos-1-yl]-4-hydroxy-2-pyrrolidinyl)methyl ester
tgacaaaataactcactataa

SEQ ID NO: 563 - RNA, 21 nt, synthetic construct
  source 1..21: mol_type = other RNA
  modified_base 1: mod_base = OTHER; note = 2'-deoxy-2'-fluorouridine-3'-phosphorothioate
  modified_base 2: mod_base = OTHER; note = 2'-O-methylguanosine-3'-phosphorothioate
  modified_base 3: mod_base = OTHER; note = 2'-deoxy-2'-fluoroadenosine-3'-phosphate
  modified_base 4: mod_base = OTHER; note = 2'-O-methylcytidine-3'-phosphate
  modified_base 5: mod_base = OTHER; note = 2'-deoxy-2'-fluoroadenosine-3'-phosphate
  modified_base 6: mod_base = OTHER; note = 2'-O-methyladenosine-3'-phosphate
  modified_base 7: mod_base = OTHER; note = 2'-deoxy-2'-fluoroadenosine-3'-phosphate
  modified_base 8: mod_base = OTHER; note = 2'-O-methyladenosine-3'-phosphate
  modified_base 9: mod_base = OTHER; note = 2'-deoxy-2'-fluorouridine-3'-phosphate
  modified_base 10: mod_base = OTHER; note = 2'-deoxy-2'-fluoroadenosine-3'-phosphate
  modified_base 11: mod_base = OTHER; note = 2'-deoxy-2'-fluoroadenosine-3'-phosphate
  modified_base 12: mod_base = OTHER; note = 2'-O-methylcytidine-3'-phosphate
  modified_base 13: mod_base = OTHER; note = 2'-deoxy-2'-fluorouridine-3'-phosphate
  modified_base 14: mod_base = OTHER; note = 2'-O-methylcytidine-3'-phosphate
  modified_base 15: mod_base = OTHER; note = 2'-deoxy-2'-fluoroadenosine-3'-phosphate
  modified_base 16: mod_base = OTHER; note = 2'-O-methylcytidine-3'-phosphate
  modified_base 17: mod_base = OTHER; note = 2'-deoxy-2'-fluorouridine-3'-phosphate
  modified_base 18: mod_base = OTHER; note = 2'-O-methyladenosine-3'-phosphate
  modified_base 19: mod_base = OTHER; note = 2'-deoxy-2'-fluorouridine-3'-phosphate
  modified_base 20: mod_base = OTHER; note = 2'-O-methyladenosine-3'-phosphate
  modified_base 21: mod_base = OTHER; note = 2'-deoxy-2'-fluoroadenosine-3'-phosphate ((2S,4R)-1-[29-[[2-(acetylamino)-2-deoxy-beta-D-galactopyra nosyl]oxy]-14,14-bis[[3-[[3-[[5-[[2-(acetylamino)-2-deoxy-b eta-D-galactopyranosyl]oxy]-1-oxopentyl]amino]propyl]amino] -3-oxopropoxy]methyl]-1,12,19,25-tetraoxo-16-oxa-13,20,24-t riazanonacos-1-yl]-4-hydroxy-2-pyrrolidinyl)methyl ester
tgacaaaataactcactataa

SEQ ID NO: 564 - RNA, 21 nt, synthetic construct
  source 1..21: mol_type = other RNA
  modified_base 1: mod_base = OTHER; note = 2'-deoxy-2'-fluorouridine-3'-phosphorothioate
  modified_base 2: mod_base = OTHER; note = 2'-O-methylguanosine-3'-phosphorothioate
  modified_base 3: mod_base = OTHER; note = 2'-deoxy-2'-fluoroadenosine-3'-phosphate
  modified_base 4: mod_base = OTHER; note = 2'-O-methylcytidine-3'-phosphate
  modified_base 5: mod_base = OTHER; note = 2'-deoxy-2'-fluoroadenosine-3'-phosphate
  modified_base 6: mod_base = OTHER; note = 2'-O-methyladenosine-3'-phosphate
  modified_base 7: mod_base = OTHER; note = 2'-deoxy-2'-fluoroadenosine-3'-phosphate
  modified_base 8: mod_base = OTHER; note = 2'-O-methyladenosine-3'-phosphate
  modified_base 9: mod_base = OTHER; note = 2'-deoxy-2'-fluorouridine-3'-phosphate
  modified_base 10: mod_base = OTHER; note = 2'-deoxy-2'-fluoroadenosine-3'-phosphate
  modified_base 11: mod_base = OTHER; note = 2'-deoxy-2'-fluoroadenosine-3'-phosphate
  modified_base 12: mod_base = OTHER; note = 2'-O-methylcytidine-3'-phosphate
  modified_base 13: mod_base = OTHER; note = 2'-deoxy-2'-fluorouridine-3'-phosphate
  modified_base 14: mod_base = OTHER; note = 2'-O-methylcytidine-3'-phosphate
  modified_base 15: mod_base = OTHER; note = 2'-deoxy-2'-fluoroadenosine-3'-phosphate
  modified_base 16: mod_base = OTHER; note = 2'-O-methylcytidine-3'-phosphate
  modified_base 17: mod_base = OTHER; note = 2'-deoxy-2'-fluorouridine-3'-phosphate
  modified_base 18: mod_base = OTHER; note = 2'-O-methyladenosine-3'-phosphate
  modified_base 19: mod_base = OTHER; note = 2'-deoxy-2'-fluorouridine-3'-phosphate
  modified_base 20: mod_base = OTHER; note = 2'-O-methyladenosine-3'-phosphate
  modified_base 21: mod_base = OTHER; note = 2'-deoxy-2'-fluoroadenosine-3'-phosphate ((2S,4R)-1-[29-[[2-(acetylamino)-2-deoxy-beta-D-galactopyra nosyl]oxy]-14,14-bis[[3-[[3-[[5-[[2-(acetylamino)-2-deoxy-b eta-D-galactopyranosyl]oxy]-1-oxopentyl]amino]propyl]amino] -3-oxopropoxy]methyl]-1,12,19,25-tetraoxo-16-oxa-13,20,24-t riazanonacos-1-yl]-4-hydroxy-2-pyrrolidinyl)methyl ester
tgacaaaataactcactataa

SEQ ID NO: 565 - RNA, 21 nt, synthetic construct
  source 1..21: mol_type = other RNA
  modified_base 1: mod_base = OTHER; note = 2'-deoxy-2'-fluoroguanosine-3'-phosphate
  modified_base 2: mod_base = OTHER; note = 2'-O-methyladenosine-3'-phosphate
  modified_base 3: mod_base = OTHER; note = 2'-deoxy-2'-fluorocytidine-3'-phosphate
  modified_base 4: mod_base = OTHER; note = 2'-O-methyladenosine-3'-phosphate
  modified_base 5: mod_base = OTHER; note = 2'-deoxy-2'-fluoroadenosine-3'-phosphate
  modified_base 6: mod_base = OTHER; note = 2'-O-methyladenosine-3'-phosphate
  modified_base 7: mod_base = OTHER; note = 2'-deoxy-2'-fluoroadenosine-3'-phosphate
  modified_base 8: mod_base = OTHER; note = 2'-O-methyluridine-3'-phosphate
  modified_base 9: mod_base = OTHER; note = 2'-deoxy-2'-fluoroadenosine-3'-phosphate
  modified_base 10: mod_base = OTHER; note = 2'-deoxy-2'-fluoroadenosine-3'-phosphate
  modified_base 11: mod_base = OTHER; note = 2'-deoxy-2'-fluorocytidine-3'-phosphate
  modified_base 12: mod_base = OTHER; note = 2'-O-methyluridine-3'-phosphate
  modified_base 13: mod_base = OTHER; note = 2'-deoxy-2'-fluorocytidine-3'-phosphate
  modified_base 14: mod_base = OTHER; note = 2'-O-methyladenosine-3'-phosphate
  modified_base 15: mod_base = OTHER; note = 2'-deoxy-2'-fluorocytidine-3'-phosphate
  modified_base 16: mod_base = OTHER; note = 2'-O-methyluridine-3'-phosphate
  modified_base 17: mod_base = OTHER; note = 2'-deoxy-2'-fluoroadenosine-3'-phosphate
  modified_base 18: mod_base = OTHER; note = 2'-O-methyluridine-3'-phosphate
  modified_base 19: mod_base = OTHER; note = 2'-deoxy-2'-fluoroadenosine-3'-phosphate
  modified_base 20: mod_base = OTHER; note = 2'-O-methyladenosine-3'-phosphate
  modified_base 21: mod_base = OTHER; note = 2'-deoxy-2'-fluorouridine-3'-phosphate ((2S,4R)-1-[29-[[2-(acetylamino)-2-deoxy-beta-D-galactopyra nosyl]oxy]-14,14-bis[[3-[[3-[[5-[[2-(acetylamino)-2-deoxy-b eta-D-galactopyranosyl]oxy]-1-oxopentyl]amino]propyl]amino] -3-oxopropoxy]methyl]-1,12,19,25-tetraoxo-16-oxa-13,20,24-t riazanonacos-1-yl]-4-hydroxy-2-pyrrolidinyl)methyl ester
gacaaaataactcactataat

SEQ ID NO: 566 - RNA, 21 nt, synthetic construct
  source 1..21: mol_type = other RNA
  modified_base 1: mod_base = OTHER; note = 2'-deoxy-2'-fluoroguanosine-3'-phosphorothioate
  modified_base 2: mod_base = OTHER; note = 2'-O-methyladenosine-3'-phosphorothioate
  modified_base 3: mod_base = OTHER; note = 2'-deoxy-2'-fluorocytidine-3'-phosphate
  modified_base 4: mod_base = OTHER; note = 2'-O-methyladenosine-3'-phosphate
  modified_base 5: mod_base = OTHER; note = 2'-deoxy-2'-fluoroadenosine-3'-phosphate
  modified_base 6: mod_base = OTHER; note = 2'-O-methyladenosine-3'-phosphate
  modified_base 7: mod_base = OTHER; note = 2'-deoxy-2'-fluoroadenosine-3'-phosphate
  modified_base 8: mod_base = OTHER; note = 2'-O-methyluridine-3'-phosphate
  modified_base 9: mod_base = OTHER; note = 2'-deoxy-2'-fluoroadenosine-3'-phosphate
  modified_base 10: mod_base = OTHER; note = 2'-deoxy-2'-fluoroadenosine-3'-phosphate
  modified_base 11: mod_base = OTHER; note = 2'-deoxy-2'-fluorocytidine-3'-phosphate
  modified_base 12: mod_base = OTHER; note = 2'-O-methyluridine-3'-phosphate
  modified_base 13: mod_base = OTHER; note = 2'-deoxy-2'-fluorocytidine-3'-phosphate
  modified_base 14: mod_base = OTHER; note = 2'-O-methyladenosine-3'-phosphate
  modified_base 15: mod_base = OTHER; note = 2'-deoxy-2'-fluorocytidine-3'-phosphate
  modified_base 16: mod_base = OTHER; note = 2'-O-methyluridine-3'-phosphate
  modified_base 17: mod_base = OTHER; note = 2'-deoxy-2'-fluoroadenosine-3'-phosphate
  modified_base 18: mod_base = OTHER; note = 2'-O-methyluridine-3'-phosphate
  modified_base 19: mod_base = OTHER; note = 2'-deoxy-2'-fluoroadenosine-3'-phosphate
  modified_base 20: mod_base = OTHER; note = 2'-O-methyladenosine-3'-phosphate
  modified_base 21: mod_base = OTHER; note = 2'-deoxy-2'-fluorouridine-3'-phosphate ((2S,4R)-1-[29-[[2-(acetylamino)-2-deoxy-beta-D-galactopyra nosyl]oxy]-14,14-bis[[3-[[3-[[5-[[2-(acetylamino)-2-deoxy-b eta-D-galactopyranosyl]oxy]-1-oxopentyl]amino]propyl]amino] -3-oxopropoxy]methyl]-1,12,19,25-tetraoxo-16-oxa-13,20,24-t riazanonacos-1-yl]-4-hydroxy-2-pyrrolidinyl)methyl ester
gacaaaataactcactataat

SEQ ID NO: 567 - RNA, 21 nt, synthetic construct
  source 1..21: mol_type = other RNA
  modified_base 1: mod_base = OTHER; note = 2'-deoxy-2'-fluoroguanosine-3'-phosphorothioate
  modified_base 2: mod_base = OTHER; note = 2'-O-methyladenosine-3'-phosphorothioate
  modified_base 3: mod_base = OTHER; note = 2'-deoxy-2'-fluorocytidine-3'-phosphate
  modified_base 4: mod_base = OTHER; note = 2'-O-methyladenosine-3'-phosphate
  modified_base 5: mod_base = OTHER; note = 2'-deoxy-2'-fluoroadenosine-3'-phosphate
  modified_base 6: mod_base = OTHER; note = 2'-O-methyladenosine-3'-phosphate
  modified_base 7: mod_base = OTHER; note = 2'-deoxy-2'-fluoroadenosine-3'-phosphate
  modified_base 8: mod_base = OTHER; note = 2'-O-methyluridine-3'-phosphate
  modified_base 9: mod_base = OTHER; note = 2'-deoxy-2'-fluoroadenosine-3'-phosphate
  modified_base 10: mod_base = OTHER; note = 2'-deoxy-2'-fluoroadenosine-3'-phosphate
  modified_base 11: mod_base = OTHER; note = 2'-deoxy-2'-fluorocytidine-3'-phosphate
  modified_base 12: mod_base = OTHER; note = 2'-O-methyluridine-3'-phosphate
  modified_base 13: mod_base = OTHER; note = 2'-deoxy-2'-fluorocytidine-3'-phosphate
  modified_base 14: mod_base = OTHER; note = 2'-O-methyladenosine-3'-phosphate
  modified_base 15: mod_base = OTHER; note = 2'-deoxy-2'-fluorocytidine-3'-phosphate
  modified_base 16: mod_base = OTHER; note = 2'-O-methyluridine-3'-phosphate
  modified_base 17: mod_base = OTHER; note = 2'-deoxy-2'-fluoroadenosine-3'-phosphate
  modified_base 18: mod_base = OTHER; note = 2'-O-methyluridine-3'-phosphate
  modified_base 19: mod_base = OTHER; note = 2'-deoxy-2'-fluoroadenosine-3'-phosphate
  modified_base 20: mod_base = OTHER; note = 2'-O-methyladenosine-3'-phosphate
  modified_base 21: mod_base = OTHER; note = 2'-deoxy-2'-fluorouridine-3'-phosphate ((2S,4R)-1-[29-[[2-(acetylamino)-2-deoxy-beta-D-galactopyra nosyl]oxy]-14,14-bis[[3-[[3-[[5-[[2-(acetylamino)-2-deoxy-b eta-D-galactopyranosyl]oxy]-1-oxopentyl]amino]propyl]amino] -3-oxopropoxy]methyl]-1,12,19,25-tetraoxo-16-oxa-13,20,24-t riazanonacos-1-yl]-4-hydroxy-2-pyrrolidinyl)methyl ester
gacaaaataactcactataat

SEQ ID NO: 568 - RNA, 21 nt, synthetic construct
  source 1..21: mol_type = other RNA
  modified_base 1: mod_base = OTHER; note = 2'-deoxy-2'-fluoroguanosine-3'-phosphate
  modified_base 2: mod_base = OTHER; note = 2'-O-methyluridine-3'-phosphate
  modified_base 3: mod_base = OTHER; note = 2'-deoxy-2'-fluorouridine-3'-phosphate
  modified_base 4: mod_base = OTHER; note = 2'-O-methylcytidine-3'-phosphate
  modified_base 5: mod_base = OTHER; note = 2'-deoxy-2'-fluorocytidine-3'-phosphate
  modified_base 6: mod_base = OTHER; note = 2'-O-methylguanosine-3'-phosphate
  modified_base 7: mod_base = OTHER; note = 2'-deoxy-2'-fluoroguanosine-3'-phosphate
  modified_base 8: mod_base = OTHER; note = 2'-O-methyladenosine-3'-phosphate
  modified_base 9: mod_base = OTHER; note = 2'-deoxy-2'-fluorouridine-3'-phosphate
  modified_base 10: mod_base = OTHER; note = 2'-deoxy-2'-fluoroadenosine-3'-phosphate
  modified_base 11: mod_base = OTHER; note = 2'-deoxy-2'-fluorouridine-3'-phosphate
  modified_base 12: mod_base = OTHER; note = 2'-O-methyluridine-3'-phosphate
  modified_base 13: mod_base = OTHER; note = 2'-deoxy-2'-fluorouridine-3'-phosphate
  modified_base 14: mod_base = OTHER; note = 2'-O-methylguanosine-3'-phosphate
  modified_base 15: mod_base = OTHER; note = 2'-deoxy-2'-fluoroadenosine-3'-phosphate
  modified_base 16: mod_base = OTHER; note = 2'-O-methyladenosine-3'-phosphate
  modified_base 17: mod_base = OTHER; note = 2'-deoxy-2'-fluorocytidine-3'-phosphate
  modified_base 18: mod_base = OTHER; note = 2'-O-methyluridine-3'-phosphate
  modified_base 19: mod_base = OTHER; note = 2'-deoxy-2'-fluorouridine-3'-phosphate
  modified_base 20: mod_base = OTHER; note = 2'-O-methyluridine-3'-phosphate
  modified_base 21: mod_base = OTHER; note = 2'-deoxy-2'-fluorouridine-3'-phosphate ((2S,4R)-1-[29-[[2-(acetylamino)-2-deoxy-beta-D-galactopyra nosyl]oxy]-14,14-bis[[3-[[3-[[5-[[2-(acetylamino)-2-deoxy-b eta-D-galactopyranosyl]oxy]-1-oxopentyl]amino]propyl]amino] -3-oxopropoxy]methyl]-1,12,19,25-tetraoxo-16-oxa-13,20,24-t riazanonacos-1-yl]-4-hydroxy-2-pyrrolidinyl)methyl ester
gttccggatatttgaactttt

SEQ ID NO: 569 - RNA, 21 nt, synthetic construct
  source 1..21: mol_type = other RNA
  modified_base 1: mod_base = OTHER; note = 2'-deoxy-2'-fluoroguanosine-3'-phosphorothioate
  modified_base 2: mod_base = OTHER; note = 2'-O-methyluridine-3'-phosphorothioate
  modified_base 3: mod_base = OTHER; note = 2'-deoxy-2'-fluorouridine-3'-phosphate
  modified_base 4: mod_base = OTHER; note = 2'-O-methylcytidine-3'-phosphate
  modified_base 5: mod_base = OTHER; note = 2'-deoxy-2'-fluorocytidine-3'-phosphate
  modified_base 6: mod_base = OTHER; note = 2'-O-methylguanosine-3'-phosphate
  modified_base 7: mod_base = OTHER; note = 2'-deoxy-2'-fluoroguanosine-3'-phosphate
  modified_base 8: mod_base = OTHER; note = 2'-O-methyladenosine-3'-phosphate
  modified_base 9: mod_base = OTHER; note = 2'-deoxy-2'-fluorouridine-3'-phosphate
  modified_base 10: mod_base = OTHER; note = 2'-deoxy-2'-fluoroadenosine-3'-phosphate
  modified_base 11: mod_base = OTHER; note = 2'-deoxy-2'-fluorouridine-3'-phosphate
  modified_base 12: mod_base = OTHER; note = 2'-O-methyluridine-3'-phosphate
  modified_base 13: mod_base = OTHER; note = 2'-deoxy-2'-fluorouridine-3'-phosphate
  modified_base 14: mod_base = OTHER; note = 2'-O-methylguanosine-3'-phosphate
  modified_base 15: mod_base = OTHER; note = 2'-deoxy-2'-fluoroadenosine-3'-phosphate
  modified_base 16: mod_base = OTHER; note = 2'-O-methyladenosine-3'-phosphate
  modified_base 17: mod_base = OTHER; note = 2'-deoxy-2'-fluorocytidine-3'-phosphate
  modified_base 18: mod_base = OTHER; note = 2'-O-methyluridine-3'-phosphate
  modified_base 19: mod_base = OTHER; note = 2'-deoxy-2'-fluorouridine-3'-phosphate
  modified_base 20: mod_base = OTHER; note = 2'-O-methyluridine-3'-phosphate
  modified_base 21: mod_base = OTHER; note = 2'-deoxy-2'-fluorouridine-3'-phosphate ((2S,4R)-1-[29-[[2-(acetylamino)-2-deoxy-beta-D-galactopyra nosyl]oxy]-14,14-bis[[3-[[3-[[5-[[2-(acetylamino)-2-deoxy-b eta-D-galactopyranosyl]oxy]-1-oxopentyl]amino]propyl]amino] -3-oxopropoxy]methyl]-1,12,19,25-tetraoxo-16-oxa-13,20,24-t riazanonacos-1-yl]-4-hydroxy-2-pyrrolidinyl)methyl ester
gttccggatatttgaactttt

SEQ ID NO: 570 - RNA, 21 nt, synthetic construct
  source 1..21: mol_type = other RNA
  modified_base 1: mod_base = OTHER; note = 2'-deoxy-2'-fluoroguanosine-3'-phosphorothioate
  modified_base 2: mod_base = OTHER; note = 2'-O-methyluridine-3'-phosphorothioate
  modified_base 3: mod_base = OTHER; note = 2'-deoxy-2'-fluorouridine-3'-phosphate
  modified_base 4: mod_base = OTHER; note = 2'-O-methylcytidine-3'-phosphate
  modified_base 5: mod_base = OTHER; note = 2'-deoxy-2'-fluorocytidine-3'-phosphate
  modified_base 6: mod_base = OTHER; note = 2'-O-methylguanosine-3'-phosphate
  modified_base 7: mod_base = OTHER; note = 2'-deoxy-2'-fluoroguanosine-3'-phosphate
  modified_base 8: mod_base = OTHER; note = 2'-O-methyladenosine-3'-phosphate
  modified_base 9: mod_base = OTHER; note = 2'-deoxy-2'-fluorouridine-3'-phosphate
  modified_base 10: mod_base = OTHER; note = 2'-deoxy-2'-fluoroadenosine-3'-phosphate
  modified_base 11: mod_base = OTHER; note = 2'-deoxy-2'-fluorouridine-3'-phosphate
  modified_base 12: mod_base = OTHER; note = 2'-O-methyluridine-3'-phosphate
  modified_base 13: mod_base = OTHER; note = 2'-deoxy-2'-fluorouridine-3'-phosphate
  modified_base 14: mod_base = OTHER; note = 2'-O-methylguanosine-3'-phosphate
  modified_base 15: mod_base = OTHER; note = 2'-deoxy-2'-fluoroadenosine-3'-phosphate
  modified_base 16: mod_base = OTHER; note = 2'-O-methyladenosine-3'-phosphate
  modified_base 17: mod_base = OTHER; note = 2'-deoxy-2'-fluorocytidine-3'-phosphate
  modified_base 18: mod_base = OTHER; note = 2'-O-methyluridine-3'-phosphate
  modified_base 19: mod_base = OTHER; note = 2'-deoxy-2'-fluorouridine-3'-phosphate
  modified_base 20: mod_base = OTHER; note = 2'-O-methyluridine-3'-phosphate
  modified_base 21: mod_base = OTHER; note = 2'-deoxy-2'-fluorouridine-3'-phosphate ((2S,4R)-1-[29-[[2-(acetylamino)-2-deoxy-beta-D-galactopyra nosyl]oxy]-14,14-bis[[3-[[3-[[5-[[2-(acetylamino)-2-deoxy-b eta-D-galactopyranosyl]oxy]-1-oxopentyl]amino]propyl]amino] -3-oxopropoxy]methyl]-1,12,19,25-tetraoxo-16-oxa-13,20,24-t riazanonacos-1-yl]-4-hydroxy-2-pyrrolidinyl)methyl ester
gttccggatatttgaactttt

SEQ ID NO: 571 - RNA, 21 nt, synthetic construct
  source 1..21: mol_type = other RNA
  modified_base 1: mod_base = OTHER; note = 2'-deoxy-2'-fluorouridine-3'-phosphate
  modified_base 2: mod_base = OTHER; note = 2'-O-methylguanosine-3'-phosphate
  modified_base 3: mod_base = OTHER; note = 2'-deoxy-2'-fluorocytidine-3'-phosphate
  modified_base 4: mod_base = OTHER; note = 2'-O-methyladenosine-3'-phosphate
  modified_base 5: mod_base = OTHER; note = 2'-deoxy-2'-fluoroguanosine-3'-phosphate
  modified_base 6: mod_base = OTHER; note = 2'-O-methyladenosine-3'-phosphate
  modified_base 7: mod_base = OTHER; note = 2'-deoxy-2'-fluorouridine-3'-phosphate
  modified_base 8: mod_base = OTHER; note = 2'-O-methylcytidine-3'-phosphate
  modified_base 9: mod_base = OTHER; note = 2'-deoxy-2'-fluoroadenosine-3'-phosphate
  modified_base 10: mod_base = OTHER; note = 2'-deoxy-2'-fluoroadenosine-3'-phosphate
  modified_base 11: mod_base = OTHER; note = 2'-deoxy-2'-fluoroadenosine-3'-phosphate
  modified_base 12: mod_base = OTHER; note = 2'-O-methylcytidine-3'-phosphate
  modified_base 13: mod_base = OTHER; note = 2'-deoxy-2'-fluoroadenosine-3'-phosphate
  modified_base 14: mod_base = OTHER; note = 2'-O-methylcytidine-3'-phosphate
  modified_base 15: mod_base = OTHER; note = 2'-deoxy-2'-fluoroadenosine-3'-phosphate
  modified_base 16: mod_base = OTHER; note = 2'-O-methyladenosine-3'-phosphate
  modified_base 17: mod_base = OTHER; note = 2'-deoxy-2'-fluorouridine-3'-phosphate
  modified_base 18: mod_base = OTHER; note = 2'-O-methyluridine-3'-phosphate
  modified_base 19: mod_base = OTHER; note = 2'-deoxy-2'-fluorouridine-3'-phosphate
  modified_base 20: mod_base = OTHER; note = 2'-O-methylcytidine-3'-phosphate
  modified_base 21: mod_base = OTHER; note = 2'-deoxy-2'-fluoroadenosine-3'-phosphate ((2S,4R)-1-[29-[[2-(acetylamino)-2-deoxy-beta-D-galactopyra nosyl]oxy]-14,14-bis[[3-[[3-[[5-[[2-(acetylamino)-2-deoxy-b eta-D-galactopyranosyl]oxy]-1-oxopentyl]amino]propyl]amino] -3-oxopropoxy]methyl]-1,12,19,25-tetraoxo-16-oxa-13,20,24-t riazanonacos-1-yl]-4-hydroxy-2-pyrrolidinyl)methyl ester
tgcagatcaaacacaatttca

SEQ ID NO: 572 - RNA, 21 nt, synthetic construct
  source 1..21: mol_type = other RNA
  modified_base 1: mod_base = OTHER; note = 2'-deoxy-2'-fluorouridine-3'-phosphorothioate
  modified_base 2: mod_base = OTHER; note = 2'-O-methylguanosine-3'-phosphorothioate
  modified_base 3: mod_base = OTHER; note = 2'-deoxy-2'-fluorocytidine-3'-phosphate
  modified_base 4: mod_base = OTHER; note = 2'-O-methyladenosine-3'-phosphate
  modified_base 5: mod_base = OTHER; note = 2'-deoxy-2'-fluoroguanosine-3'-phosphate
  modified_base 6: mod_base = OTHER; note = 2'-O-methyladenosine-3'-phosphate
  modified_base 7: mod_base = OTHER; note = 2'-deoxy-2'-fluorouridine-3'-phosphate
  modified_base 8: mod_base = OTHER; note = 2'-O-methylcytidine-3'-phosphate
  modified_base 9: mod_base = OTHER; note = 2'-deoxy-2'-fluoroadenosine-3'-phosphate
  modified_base 10: mod_base = OTHER; note = 2'-deoxy-2'-fluoroadenosine-3'-phosphate
  modified_base 11: mod_base = OTHER; note = 2'-deoxy-2'-fluoroadenosine-3'-phosphate
  modified_base 12: mod_base = OTHER; note = 2'-O-methylcytidine-3'-phosphate
  modified_base 13: mod_base = OTHER; note = 2'-deoxy-2'-fluoroadenosine-3'-phosphate
  modified_base 14: mod_base = OTHER; note = 2'-O-methylcytidine-3'-phosphate
  modified_base 15: mod_base = OTHER; note = 2'-deoxy-2'-fluoroadenosine-3'-phosphate
  modified_base 16: mod_base = OTHER; note = 2'-O-methyladenosine-3'-phosphate
  modified_base 17: mod_base = OTHER; note = 2'-deoxy-2'-fluorouridine-3'-phosphate
  modified_base 18: mod_base = OTHER; note = 2'-O-methyluridine-3'-phosphate
  modified_base 19: mod_base = OTHER; note = 2'-deoxy-2'-fluorouridine-3'-phosphate
  modified_base 20: mod_base = OTHER; note = 2'-O-methylcytidine-3'-phosphate
  modified_base 21: mod_base = OTHER; note = 2'-deoxy-2'-fluoroadenosine-3'-phosphate ((2S,4R)-1-[29-[[2-(acetylamino)-2-deoxy-beta-D-galactopyra nosyl]oxy]-14,14-bis[[3-[[3-[[5-[[2-(acetylamino)-2-deoxy-b eta-D-galactopyranosyl]oxy]-1-oxopentyl]amino]propyl]amino] -3-oxopropoxy]methyl]-1,12,19,25-tetraoxo-16-oxa-13,20,24-t riazanonacos-1-yl]-4-hydroxy-2-pyrrolidinyl)methyl ester
tgcagatcaaacacaatttca

SEQ ID NO: 573 - RNA, 21 nt, synthetic construct
  source 1..21: mol_type = other RNA
  modified_base 1: mod_base = OTHER; note = 2'-deoxy-2'-fluorouridine-3'-phosphorothioate
  modified_base 2: mod_base = OTHER; note = 2'-O-methylguanosine-3'-phosphorothioate
  modified_base 3: mod_base = OTHER; note = 2'-deoxy-2'-fluorocytidine-3'-phosphate
  modified_base 4: mod_base = OTHER; note = 2'-O-methyladenosine-3'-phosphate
  modified_base 5: mod_base = OTHER; note = 2'-deoxy-2'-fluoroguanosine-3'-phosphate
  modified_base 6: mod_base = OTHER; note = 2'-O-methyladenosine-3'-phosphate
  modified_base 7: mod_base = OTHER; note = 2'-deoxy-2'-fluorouridine-3'-phosphate
  modified_base 8: mod_base = OTHER; note = 2'-O-methylcytidine-3'-phosphate
  modified_base 9: mod_base = OTHER; note = 2'-deoxy-2'-fluoroadenosine-3'-phosphate
  modified_base 10: mod_base = OTHER; note = 2'-deoxy-2'-fluoroadenosine-3'-phosphate
  modified_base 11: mod_base = OTHER; note = 2'-deoxy-2'-fluoroadenosine-3'-phosphate
  modified_base 12: mod_base = OTHER; note = 2'-O-methylcytidine-3'-phosphate
  modified_base 13: mod_base = OTHER; note = 2'-deoxy-2'-fluoroadenosine-3'-phosphate
  modified_base 14: mod_base = OTHER; note = 2'-O-methylcytidine-3'-phosphate
  modified_base 15: mod_base = OTHER; note = 2'-deoxy-2'-fluoroadenosine-3'-phosphate
  modified_base 16: mod_base = OTHER; note = 2'-O-methyladenosine-3'-phosphate
  modified_base 17: mod_base = OTHER; note = 2'-deoxy-2'-fluorouridine-3'-phosphate
  modified_base 18: mod_base = OTHER; note = 2'-O-methyluridine-3'-phosphate
  modified_base 19: mod_base = OTHER; note = 2'-deoxy-2'-fluorouridine-3'-phosphate
  modified_base 20: mod_base = OTHER; note = 2'-O-methylcytidine-3'-phosphate
  modified_base 21: mod_base = OTHER; note = 2'-deoxy-2'-fluoroadenosine-3'-phosphate ((2S,4R)-1-[29-[[2-(acetylamino)-2-deoxy-beta-D-galactopyra nosyl]oxy]-14,14-bis[[3-[[3-[[5-[[2-(acetylamino)-2-deoxy-b eta-D-galactopyranosyl]oxy]-1-oxopentyl]amino]propyl]amino] -3-oxopropoxy]methyl]-1,12,19,25-tetraoxo-16-oxa-13,20,24-t riazanonacos-1-yl]-4-hydroxy-2-pyrrolidinyl)methyl ester
tgcagatcaaacacaatttca

SEQ ID NO: 574 - RNA, 21 nt, synthetic construct
  source 1..21: mol_type = other RNA
  modified_base 1: mod_base = OTHER; note = 2'-deoxy-2'-fluoroadenosine-3'-phosphate
  modified_base 2: mod_base = OTHER; note = 2'-O-methyladenosine-3'-phosphate
  modified_base 3: mod_base = OTHER; note = 2'-deoxy-2'-fluoroguanosine-3'-phosphate
  modified_base 4: mod_base = OTHER; note = 2'-O-methylcytidine-3'-phosphate
  modified_base 5: mod_base = OTHER; note = 2'-deoxy-2'-fluoroadenosine-3'-phosphate
  modified_base 6: mod_base = OTHER; note = 2'-O-methyladenosine-3'-phosphate
  modified_base 7: mod_base = OTHER; note = 2'-deoxy-2'-fluoroguanosine-3'-phosphate
  modified_base 8: mod_base = OTHER; note = 2'-O-methyladenosine-3'-phosphate
  modified_base 9: mod_base = OTHER; note = 2'-deoxy-2'-fluorouridine-3'-phosphate
  modified_base 10: mod_base = OTHER; note = 2'-deoxy-2'-fluoroadenosine-3'-phosphate
  modified_base 11: mod_base = OTHER; note = 2'-deoxy-2'-fluorouridine-3'-phosphate
  modified_base 12: mod_base = OTHER; note = 2'-O-methyluridine-3'-phosphate
  modified_base 13: mod_base = OTHER; note = 2'-deoxy-2'-fluorouridine-3'-phosphate
  modified_base 14: mod_base = OTHER; note = 2'-O-methyluridine-3'-phosphate
  modified_base 15: mod_base = OTHER; note = 2'-deoxy-2'-fluorouridine-3'-phosphate
  modified_base 16: mod_base = OTHER; note = 2'-O-methyladenosine-3'-phosphate
  modified_base 17: mod_base = OTHER; note = 2'-deoxy-2'-fluorouridine-3'-phosphate
  modified_base 18: mod_base = OTHER; note = 2'-O-methyladenosine-3'-phosphate
  modified_base 19: mod_base = OTHER; note = 2'-deoxy-2'-fluoroadenosine-3'-phosphate
  modified_base 20: mod_base = OTHER; note = 2'-O-methyluridine-3'-phosphate
  modified_base 21: mod_base = OTHER; note = 2'-deoxy-2'-fluoroadenosine-3'-phosphate ((2S,4R)-1-[29-[[2-(acetylamino)-2-deoxy-beta-D-galactopyra nosyl]oxy]-14,14-bis[[3-[[3-[[5-[[2-(acetylamino)-2-deoxy-b eta-D-galactopyranosyl]oxy]-1-oxopentyl]amino]propyl]amino] -3-oxopropoxy]methyl]-1,12,19,25-tetraoxo-16-oxa-13,20,24-t riazanonacos-1-yl]-4-hydroxy-2-pyrrolidinyl)methyl ester
aagcaagatatttttataata

SEQ ID NO: 575 - RNA, 21 nt, synthetic construct
  source 1..21: mol_type = other RNA
  modified_base 1: mod_base = OTHER; note = 2'-deoxy-2'-fluoroadenosine-3'-phosphorothioate
  modified_base 2: mod_base = OTHER; note = 2'-O-methyladenosine-3'-phosphorothioate
  modified_base 3: mod_base = OTHER; note = 2'-deoxy-2'-fluoroguanosine-3'-phosphate
  modified_base 4: mod_base = OTHER; note = 2'-O-methylcytidine-3'-phosphate
  modified_base 5: mod_base = OTHER; note = 2'-deoxy-2'-fluoroadenosine-3'-phosphate
  modified_base 6: mod_base = OTHER; note = 2'-O-methyladenosine-3'-phosphate
  modified_base 7: mod_base = OTHER; note = 2'-deoxy-2'-fluoroguanosine-3'-phosphate
  modified_base 8: mod_base = OTHER; note = 2'-O-methyladenosine-3'-phosphate
  modified_base 9: mod_base = OTHER; note = 2'-deoxy-2'-fluorouridine-3'-phosphate
  modified_base 10: mod_base = OTHER; note = 2'-deoxy-2'-fluoroadenosine-3'-phosphate
  modified_base 11: mod_base = OTHER; note = 2'-deoxy-2'-fluorouridine-3'-phosphate
  modified_base 12: mod_base = OTHER; note = 2'-O-methyluridine-3'-phosphate
  modified_base 13: mod_base = OTHER; note = 2'-deoxy-2'-fluorouridine-3'-phosphate
  modified_base 14: mod_base = OTHER; note = 2'-O-methyluridine-3'-phosphate
  modified_base 15: mod_base = OTHER; note = 2'-deoxy-2'-fluorouridine-3'-phosphate
  modified_base 16: mod_base = OTHER; note = 2'-O-methyladenosine-3'-phosphate
  modified_base 17: mod_base = OTHER; note = 2'-deoxy-2'-fluorouridine-3'-phosphate
  modified_base 18: mod_base = OTHER; note = 2'-O-methyladenosine-3'-phosphate
  modified_base 19: mod_base = OTHER; note = 2'-deoxy-2'-fluoroadenosine-3'-phosphate
  modified_base 20: mod_base = OTHER; note = 2'-O-methyluridine-3'-phosphate
  modified_base 21: mod_base = OTHER; note = 2'-deoxy-2'-fluoroadenosine-3'-phosphate ((2S,4R)-1-[29-[[2-(acetylamino)-2-deoxy-beta-D-galactopyra nosyl]oxy]-14,14-bis[[3-[[3-[[5-[[2-(acetylamino)-2-deoxy-b eta-D-galactopyranosyl]oxy]-1-oxopentyl]amino]propyl]amino] -3-oxopropoxy]methyl]-1,12,19,25-tetraoxo-16-oxa-13,20,24-t riazanonacos-1-yl]-4-hydroxy-2-pyrrolidinyl)methyl ester
aagcaagatatttttataata

SEQ ID NO: 576 - RNA, 21 nt, synthetic construct
  source 1..21: mol_type = other RNA
  modified_base 1: mod_base = OTHER; note = 2'-deoxy-2'-fluoroadenosine-3'-phosphorothioate
  modified_base 2: mod_base = OTHER; note = 2'-O-methyladenosine-3'-phosphorothioate
  modified_base 3: mod_base = OTHER; note = 2'-deoxy-2'-fluoroguanosine-3'-phosphate
  modified_base 4: mod_base = OTHER; note = 2'-O-methylcytidine-3'-phosphate
  modified_base 5: mod_base = OTHER; note = 2'-deoxy-2'-fluoroadenosine-3'-phosphate
  modified_base 6: mod_base = OTHER; note = 2'-O-methyladenosine-3'-phosphate
  modified_base 7: mod_base = OTHER; note = 2'-deoxy-2'-fluoroguanosine-3'-phosphate
  modified_base 8: mod_base = OTHER; note = 2'-O-methyladenosine-3'-phosphate
  modified_base 9: mod_base = OTHER; note = 2'-deoxy-2'-fluorouridine-3'-phosphate
  modified_base 10: mod_base = OTHER; note = 2'-deoxy-2'-fluoroadenosine-3'-phosphate
  modified_base 11: mod_base = OTHER; note = 2'-deoxy-2'-fluorouridine-3'-phosphate
  modified_base 12: mod_base = OTHER; note = 2'-O-methyluridine-3'-phosphate
  modified_base 13: mod_base = OTHER; note = 2'-deoxy-2'-fluorouridine-3'-phosphate
  modified_base 14: mod_base = OTHER; note = 2'-O-methyluridine-3'-phosphate
  modified_base 15: mod_base = OTHER; note = 2'-deoxy-2'-fluorouridine-3'-phosphate
  modified_base 16: mod_base = OTHER; note = 2'-O-methyladenosine-3'-phosphate
  modified_base 17: mod_base = OTHER; note = 2'-deoxy-2'-fluorouridine-3'-phosphate
  modified_base 18: mod_base = OTHER; note = 2'-O-methyladenosine-3'-phosphate
  modified_base 19: mod_base = OTHER; note = 2'-deoxy-2'-fluoroadenosine-3'-phosphate
  modified_base 20: mod_base = OTHER; note = 2'-O-methyluridine-3'-phosphate
  modified_base 21: mod_base = OTHER; note = 2'-deoxy-2'-fluoroadenosine-3'-phosphate ((2S,4R)-1-[29-[[2-(acetylamino)-2-deoxy-beta-D-galactopyra nosyl]oxy]-14,14-bis[[3-[[3-[[5-[[2-(acetylamino)-2-deoxy-b eta-D-galactopyranosyl]oxy]-1-oxopentyl]amino]propyl]amino] -3-oxopropoxy]methyl]-1,12,19,25-tetraoxo-16-oxa-13,20,24-t riazanonacos-1-yl]-4-hydroxy-2-pyrrolidinyl)methyl ester
aagcaagatatttttataata

SEQ ID NO: 577 - RNA, 21 nt, synthetic construct
  source 1..21: mol_type = other RNA
  modified_base 1: mod_base = OTHER; note = 2'-deoxy-2'-fluorocytidine-3'-phosphate
  modified_base 2: mod_base = OTHER; note = 2'-O-methyladenosine-3'-phosphate
  modified_base 3: mod_base = OTHER; note = 2'-deoxy-2'-fluoroguanosine-3'-phosphate
  modified_base 4: mod_base = OTHER; note = 2'-O-methyladenosine-3'-phosphate
  modified_base 5: mod_base = OTHER; note = 2'-deoxy-2'-fluorouridine-3'-phosphate
  modified_base 6: mod_base = OTHER; note = 2'-O-methylcytidine-3'-phosphate
  modified_base 7: mod_base = OTHER; note = 2'-deoxy-2'-fluoroadenosine-3'-phosphate
  modified_base 8: mod_base = OTHER; note = 2'-O-methyladenosine-3'-phosphate
  modified_base 9: mod_base = OTHER; note = 2'-deoxy-2'-fluoroadenosine-3'-phosphate
  modified_base 10: mod_base = OTHER; note = 2'-deoxy-2'-fluorocytidine-3'-phosphate
  modified_base 11: mod_base = OTHER; note = 2'-deoxy-2'-fluoroadenosine-3'-phosphate
  modified_base 12: mod_base = OTHER; note = 2'-O-methylcytidine-3'-phosphate
  modified_base 13: mod_base = OTHER; note = 2'-deoxy-2'-fluoroadenosine-3'-phosphate
  modified_base 14: mod_base = OTHER; note = 2'-O-methyladenosine-3'-phosphate
  modified_base 15: mod_base = OTHER; note = 2'-deoxy-2'-fluorouridine-3'-phosphate
  modified_base 16: mod_base = OTHER; note = 2'-O-methyluridine-3'-phosphate
  modified_base 17: mod_base = OTHER; note = 2'-deoxy-2'-fluorouridine-3'-phosphate
  modified_base 18: mod_base = OTHER; note = 2'-O-methylcytidine-3'-phosphate
  modified_base 19: mod_base = OTHER; note = 2'-deoxy-2'-fluoroadenosine-3'-phosphate
  modified_base 20: mod_base = OTHER; note = 2'-O-methylguanosine-3'-phosphate
  modified_base 21: mod_base = OTHER; note = 2'-deoxy-2'-fluorouridine-3'-phosphate ((2S,4R)-1-[29-[[2-(acetylamino)-2-deoxy-beta-D-galactopyra nosyl]oxy]-14,14-bis[[3-[[3-[[5-[[2-(acetylamino)-2-deoxy-b eta-D-galactopyranosyl]oxy]-1-oxopentyl]amino]propyl]amino] -3-oxopropoxy]methyl]-1,12,19,25-tetraoxo-16-oxa-13,20,24-t riazanonacos-1-yl]-4-hydroxy-2-pyrrolidinyl)methyl ester
cagatcaaacacaatttcagt

SEQ ID NO: 578 - RNA, 21 nt, synthetic construct
  source 1..21: mol_type = other RNA
  modified_base 1: mod_base = OTHER; note = 2'-deoxy-2'-fluorocytidine-3'-phosphorothioate
  modified_base 2: mod_base = OTHER; note = 2'-O-methyladenosine-3'-phosphorothioate
  modified_base 3: mod_base = OTHER; note = 2'-deoxy-2'-fluoroguanosine-3'-phosphate
  modified_base 4: mod_base = OTHER; note = 2'-O-methyladenosine-3'-phosphate
  modified_base 5: mod_base = OTHER; note = 2'-deoxy-2'-fluorouridine-3'-phosphate
  modified_base 6: mod_base = OTHER; note = 2'-O-methylcytidine-3'-phosphate
  modified_base 7: mod_base = OTHER; note = 2'-deoxy-2'-fluoroadenosine-3'-phosphate
  modified_base 8: mod_base = OTHER; note = 2'-O-methyladenosine-3'-phosphate
  modified_base 9: mod_base = OTHER; note = 2'-deoxy-2'-fluoroadenosine-3'-phosphate
  modified_base 10: mod_base = OTHER; note = 2'-deoxy-2'-fluorocytidine-3'-phosphate
  modified_base 11: mod_base = OTHER; note = 2'-deoxy-2'-fluoroadenosine-3'-phosphate
  modified_base 12: mod_base = OTHER; note = 2'-O-methylcytidine-3'-phosphate
  modified_base 13: mod_base = OTHER; note = 2'-deoxy-2'-fluoroadenosine-3'-phosphate
  modified_base 14: mod_base = OTHER; note = 2'-O-methyladenosine-3'-phosphate
  modified_base 15: mod_base = OTHER; note = 2'-deoxy-2'-fluorouridine-3'-phosphate
  modified_base 16: mod_base = OTHER; note = 2'-O-methyluridine-3'-phosphate
  modified_base 17: mod_base = OTHER; note = 2'-deoxy-2'-fluorouridine-3'-phosphate
  modified_base 18: mod_base = OTHER; note = 2'-O-methylcytidine-3'-phosphate
  modified_base 19: mod_base = OTHER; note = 2'-deoxy-2'-fluoroadenosine-3'-phosphate
  modified_base 20: mod_base = OTHER; note = 2'-O-methylguanosine-3'-phosphate
  modified_base 21: mod_base = OTHER; note = 2'-deoxy-2'-fluorouridine-3'-phosphate ((2S,4R)-1-[29-[[2-(acetylamino)-2-deoxy-beta-D-galactopyra nosyl]oxy]-14,14-bis[[3-[[3-[[5-[[2-(acetylamino)-2-deoxy-b eta-D-galactopyranosyl]oxy]-1-oxopentyl]amino]propyl]amino] -3-oxopropoxy]methyl]-1,12,19,25-tetraoxo-16-oxa-13,20,24-t riazanonacos-1-yl]-4-hydroxy-2-pyrrolidinyl)methyl ester
cagatcaaacacaatttcagt

SEQ ID NO: 579 - RNA, 21 nt, synthetic construct
  source 1..21: mol_type = other RNA
  modified_base 1: mod_base = OTHER; note = 2'-deoxy-2'-fluorocytidine-3'-phosphorothioate
  modified_base 2: mod_base = OTHER; note = 2'-O-methyladenosine-3'-phosphorothioate
  modified_base 3: mod_base = OTHER; note = 2'-deoxy-2'-fluoroguanosine-3'-phosphate
  modified_base 4: mod_base = OTHER; note = 2'-O-methyladenosine-3'-phosphate
  modified_base 5: mod_base = OTHER; note = 2'-deoxy-2'-fluorouridine-3'-phosphate
  modified_base 6: mod_base = OTHER; note = 2'-O-methylcytidine-3'-phosphate
  modified_base 7: mod_base = OTHER; note = 2'-deoxy-2'-fluoroadenosine-3'-phosphate
  modified_base 8: mod_base = OTHER; note = 2'-O-methyladenosine-3'-phosphate
  modified_base 9: mod_base = OTHER; note = 2'-deoxy-2'-fluoroadenosine-3'-phosphate
  modified_base 10: mod_base = OTHER; note = 2'-deoxy-2'-fluorocytidine-3'-phosphate
  modified_base 11: mod_base = OTHER; note = 2'-deoxy-2'-fluoroadenosine-3'-phosphate
  modified_base 12: mod_base = OTHER; note = 2'-O-methylcytidine-3'-phosphate
  modified_base 13: mod_base = OTHER; note = 2'-deoxy-2'-fluoroadenosine-3'-phosphate
  modified_base 14: mod_base = OTHER; note = 2'-O-methyladenosine-3'-phosphate
  modified_base 15: mod_base = OTHER; note = 2'-deoxy-2'-fluorouridine-3'-phosphate
  modified_base 16: mod_base = OTHER; note = 2'-O-methyluridine-3'-phosphate
  modified_base 17: mod_base = OTHER; note = 2'-deoxy-2'-fluorouridine-3'-phosphate
  modified_base 18: mod_base = OTHER; note = 2'-O-methylcytidine-3'-phosphate
  modified_base 19: mod_base = OTHER; note = 2'-deoxy-2'-fluoroadenosine-3'-phosphate
  modified_base 20: mod_base = OTHER; note = 2'-O-methylguanosine-3'-phosphate
  modified_base 21: mod_base = OTHER; note = 2'-deoxy-2'-fluorouridine-3'-phosphate ((2S,4R)-1-[29-[[2-(acetylamino)-2-deoxy-beta-D-galactopyra nosyl]oxy]-14,14-bis[[3-[[3-[[5-[[2-(acetylamino)-2-deoxy-b eta-D-galactopyranosyl]oxy]-1-oxopentyl]amino]propyl]amino] -3-oxopropoxy]methyl]-1,12,19,25-tetraoxo-16-oxa-13,20,24-t riazanonacos-1-yl]-4-hydroxy-2-pyrrolidinyl)methyl ester
cagatcaaacacaatttcagt

SEQ ID NO: 580 - RNA, 23 nt, synthetic construct
  source 1..23: mol_type = other RNA
  modified_base 1: mod_base = OTHER; note = 2'-O-methyladenosine-3'-phosphate
  modified_base 2: mod_base = OTHER; note = 2'-deoxy-2'-fluoroadenosine-3'-phosphate
  modified_base 3: mod_base = OTHER; note = 2'-O-methyladenosine-3'-phosphate
  modified_base 4: mod_base = OTHER; note = 2'-deoxy-2'-fluoroguanosine-3'-phosphate
  modified_base 5: mod_base = OTHER; note = 2'-O-methylguanosine-3'-phosphate
  modified_base 6: mod_base = OTHER; note = 2'-deoxy-2'-fluorouridine-3'-phosphate
  modified_base 7: mod_base = OTHER; note = 2'-O-methyladenosine-3'-phosphate
  modified_base 8: mod_base = OTHER; note = 2'-deoxy-2'-fluorocytidine-3'-phosphate
  modified_base 9: mod_base = OTHER; note = 2'-O-methyluridine-3'-phosphate
  modified_base 10: mod_base = OTHER; note = 2'-deoxy-2'-fluorouridine-3'-phosphate
  modified_base 11: mod_base = OTHER; note = 2'-O-methylguanosine-3'-phosphate
  modified_base 12: mod_base = OTHER; note = 2'-O-methyluridine-3'-phosphate
  modified_base 13: mod_base = OTHER; note = 2'-O-methyluridine-3'-phosphate
  modified_base 14: mod_base = OTHER; note = 2'-deoxy-2'-fluoroguanosine-3'-phosphate
  modified_base 15: mod_base = OTHER; note = 2'-O-methyluridine-3'-phosphate
  modified_base 16: mod_base = OTHER; note = 2'-deoxy-2'-fluorouridine-3'-phosphate
  modified_base 17: mod_base = OTHER; note = 2'-O-methyluridine-3'-phosphate
  modified_base 18: mod_base = OTHER; note = 2'-deoxy-2'-fluoroadenosine-3'-phosphate
  modified_base 19: mod_base = OTHER; note = 2'-O-methyladenosine-3'-phosphate
  modified_base 20: mod_base = OTHER; note = 2'-deoxy-2'-fluoroadenosine-3'-phosphate
  modified_base 21: mod_base = OTHER; note = 2'-O-methyluridine-3'-phosphorothioate
  modified_base 22: mod_base = OTHER; note = 2'-deoxy-2'-fluorocytidine-3'-phosphorothioate
  modified_base 23: mod_base = OTHER; note = 2'-O-methyluridine
aaaggtacttgttgtttaaatct

SEQ ID NO: 581 - RNA, 23 nt, synthetic construct
  source 1..23: mol_type = other RNA
  modified_base 1: mod_base = OTHER; note = 2'-O-methyladenosine-3'-phosphorothioate
  modified_base 2: mod_base = OTHER; note = 2'-deoxy-2'-fluoroadenosine-3'-phosphorothioate
  modified_base 3: mod_base = OTHER; note = 2'-O-methyladenosine-3'-phosphate
  modified_base 4: mod_base = OTHER; note = 2'-deoxy-2'-fluoroguanosine-3'-phosphate
  modified_base 5: mod_base = OTHER; note = 2'-O-methylguanosine-3'-phosphate
  modified_base 6: mod_base = OTHER; note = 2'-deoxy-2'-fluorouridine-3'-phosphate
  modified_base 7: mod_base = OTHER; note = 2'-O-methyladenosine-3'-phosphate
  modified_base 8: mod_base = OTHER; note = 2'-deoxy-2'-fluorocytidine-3'-phosphate
  modified_base 9: mod_base = OTHER; note = 2'-O-methyluridine-3'-phosphate
  modified_base 10: mod_base = OTHER; note = 2'-deoxy-2'-fluorouridine-3'-phosphate
  modified_base 11: mod_base = OTHER; note = 2'-O-methylguanosine-3'-phosphate
  modified_base 12: mod_base = OTHER; note = 2'-O-methyluridine-3'-phosphate
  modified_base 13: mod_base = OTHER; note = 2'-O-methyluridine-3'-phosphate
  modified_base 14: mod_base = OTHER; note = 2'-deoxy-2'-fluoroguanosine-3'-phosphate
  modified_base 15: mod_base = OTHER; note = 2'-O-methyluridine-3'-phosphate
  modified_base 16: mod_base = OTHER; note = 2'-deoxy-2'-fluorouridine-3'-phosphate
  modified_base 17: mod_base = OTHER; note = 2'-O-methyluridine-3'-phosphate
  modified_base 18: mod_base = OTHER; note = 2'-deoxy-2'-fluoroadenosine-3'-phosphate
  modified_base 19: mod_base = OTHER; note = 2'-O-methyladenosine-3'-phosphate
  modified_base 20: mod_base = OTHER; note = 2'-deoxy-2'-fluoroadenosine-3'-phosphate
  modified_base 21: mod_base = OTHER; note = 2'-O-methyluridine-3'-phosphorothioate
  modified_base 22: mod_base = OTHER; note = 2'-O-methylcytidine-3'-phosphorothioate
  modified_base 23: mod_base = OTHER; note = 2'-O-methyluridine
aaaggtacttgttgtttaaatct

SEQ ID NO: 582 - RNA, 23 nt, synthetic construct
  source 1..23: mol_type = other RNA
  modified_base 1: mod_base = OTHER; note = 2'-O-methyladenosine-3'-phosphorothioate
  modified_base 2: mod_base = OTHER; note = 2'-deoxy-2'-fluoroadenosine-3'-phosphorothioate
  modified_base 3: mod_base = OTHER; note = 2'-O-methyladenosine-3'-phosphate
  modified_base 4: mod_base = OTHER; note = 2'-deoxy-2'-fluoroguanosine-3'-phosphorothioate
  modified_base 5: mod_base = OTHER; note = 2'-O-methylguanosine-3'-phosphate
  modified_base 6: mod_base = OTHER; note = 2'-deoxy-2'-fluorouridine-3'-phosphorothioate
  modified_base 7: mod_base = OTHER; note = 2'-O-methyladenosine-3'-phosphate
  modified_base 8: mod_base = OTHER; note = 2'-deoxy-2'-fluorocytidine-3'-phosphorothioate
  modified_base 9: mod_base = OTHER; note = 2'-O-methyluridine-3'-phosphate
  modified_base 10: mod_base = OTHER; note = 2'-deoxy-2'-fluorouridine-3'-phosphorothioate
  modified_base 11: mod_base = OTHER; note = 2'-O-methylguanosine-3'-phosphate
  modified_base 12: mod_base = OTHER; note = 2'-O-methyluridine-3'-phosphate
  modified_base 13: mod_base = OTHER; note = 2'-O-methyluridine-3'-phosphate
  modified_base 14: mod_base = OTHER; note = 2'-deoxy-2'-fluoroguanosine-3'-phosphorothioate
  modified_base 15: mod_base = OTHER; note = 2'-O-methyluridine-3'-phosphate
  modified_base 16: mod_base = OTHER; note = 2'-deoxy-2'-fluorouridine-3'-phosphorothioate
  modified_base 17: mod_base = OTHER; note = 2'-O-methyluridine-3'-phosphate
  modified_base 18: mod_base = OTHER; note = 2'-deoxy-2'-fluoroadenosine-3'-phosphorothioate
  modified_base 19: mod_base = OTHER; note = 2'-O-methyladenosine-3'-phosphate
  modified_base 20: mod_base = OTHER; note = 2'-deoxy-2'-fluoroadenosine-3'-phosphorothioate
  modified_base 21: mod_base = OTHER; note = 2'-O-methyluridine-3'-phosphorothioate
  modified_base 22: mod_base = OTHER; note = 2'-O-methylcytidine-3'-phosphorothioate
  modified_base 23: mod_base = OTHER; note = 2'-O-methyluridine
aaaggtacttgttgtttaaatct

SEQ ID NO: 583 - RNA, 23 nt, synthetic construct
  source 1..23: mol_type = other RNA
  modified_base 1: mod_base = OTHER; note = 2'-O-methyluridine-3'-phosphate
  modified_base 2: mod_base = OTHER; note = 2'-deoxy-2'-fluorouridine-3'-phosphate
  modified_base 3: mod_base = OTHER; note = 2'-O-methyladenosine-3'-phosphate
  modified_base 4: mod_base = OTHER; note = 2'-deoxy-2'-fluorouridine-3'-phosphate
  modified_base 5: mod_base = OTHER; note = 2'-O-methyladenosine-3'-phosphate
  modified_base 6: mod_base = OTHER; note = 2'-deoxy-2'-fluoroguanosine-3'-phosphate
  modified_base 7: mod_base = OTHER; note = 2'-O-methyluridine-3'-phosphate
  modified_base 8: mod_base = OTHER; note = 2'-deoxy-2'-fluoroguanosine-3'-phosphate
  modified_base 9: mod_base = OTHER; note = 2'-O-methyladenosine-3'-phosphate
  modified_base 10: mod_base = OTHER; note = 2'-deoxy-2'-fluoroguanosine-3'-phosphate
  modified_base 11: mod_base = OTHER; note = 2'-O-methyluridine-3'-phosphate
  modified_base 12: mod_base = OTHER; note = 2'-O-methyluridine-3'-phosphate
  modified_base 13: mod_base = OTHER; note = 2'-O-methyladenosine-3'-phosphate
  modified_base 14: mod_base = OTHER; note = 2'-deoxy-2'-fluorouridine-3'-phosphate
  modified_base 15: mod_base = OTHER; note = 2'-O-methyluridine-3'-phosphate
  modified_base 16: mod_base = OTHER; note = 2'-deoxy-2'-fluorouridine-3'-phosphate
  modified_base 17: mod_base = OTHER; note = 2'-O-methyluridine-3'-phosphate
  modified_base 18: mod_base = OTHER; note = 2'-deoxy-2'-fluoroguanosine-3'-phosphate
  modified_base 19: mod_base = OTHER; note = 2'-O-methyluridine-3'-phosphate
  modified_base 20: mod_base = OTHER; note = 2'-deoxy-2'-fluorocytidine-3'-phosphate
  modified_base 21: mod_base = OTHER; note = 2'-O-methyladenosine-3'-phosphorothioate
  modified_base 22: mod_base = OTHER; note = 2'-deoxy-2'-fluoroadenosine-3'-phosphorothioate
  modified_base 23: mod_base = OTHER; note = 2'-O-methyluridine
ttatagtgagttattttgtcaat

SEQ ID NO: 584 - RNA, 23 nt, synthetic construct
  source 1..23: mol_type = other RNA
  modified_base 1: mod_base = OTHER; note = 2'-O-methyluridine-3'-phosphorothioate
  modified_base 2: mod_base = OTHER; note = 2'-deoxy-2'-fluorouridine-3'-phosphorothioate
  modified_base 3: mod_base = OTHER; note = 2'-O-methyladenosine-3'-phosphate
  modified_base 4: mod_base = OTHER; note = 2'-deoxy-2'-fluorouridine-3'-phosphate
  modified_base 5: mod_base = OTHER; note = 2'-O-methyladenosine-3'-phosphate
  modified_base 6: mod_base = OTHER; note = 2'-deoxy-2'-fluoroguanosine-3'-phosphate
  modified_base 7: mod_base = OTHER; note = 2'-O-methyluridine-3'-phosphate
  modified_base 8: mod_base = OTHER; note = 2'-deoxy-2'-fluoroguanosine-3'-phosphate
  modified_base 9: mod_base = OTHER; note = 2'-O-methyladenosine-3'-phosphate
  modified_base 10: mod_base = OTHER; note = 2'-deoxy-2'-fluoroguanosine-3'-phosphate
  modified_base 11: mod_base = OTHER; note = 2'-O-methyluridine-3'-phosphate
  modified_base 12: mod_base = OTHER; note = 2'-O-methyluridine-3'-phosphate
  modified_base 13: mod_base = OTHER; note = 2'-O-methyladenosine-3'-phosphate
  modified_base 14: mod_base = OTHER; note = 2'-deoxy-2'-fluorouridine-3'-phosphate
  modified_base 15: mod_base = OTHER; note = 2'-O-methyluridine-3'-phosphate
  modified_base 16: mod_base = OTHER; note = 2'-deoxy-2'-fluorouridine-3'-phosphate
  modified_base 17: mod_base = OTHER; note = 2'-O-methyluridine-3'-phosphate
  modified_base 18: mod_base = OTHER; note = 2'-deoxy-2'-fluoroguanosine-3'-phosphate
  modified_base 19: mod_base = OTHER; note = 2'-O-methyluridine-3'-phosphate
  modified_base 20: mod_base = OTHER; note = 2'-deoxy-2'-fluorocytidine-3'-phosphate
  modified_base 21: mod_base = OTHER; note = 2'-O-methyladenosine-3'-phosphorothioate
  modified_base 22: mod_base = OTHER; note = 2'-O-methyladenosine-3'-phosphorothioate
  modified_base 23: mod_base = OTHER; note = 2'-O-methyluridine
ttatagtgagttattttgtcaat

SEQ ID NO: 585 - RNA, 23 nt, synthetic construct
  source 1..23: mol_type = other RNA
  modified_base 1: mod_base = OTHER; note = 2'-O-methyluridine-3'-phosphorothioate
  modified_base 2: mod_base = OTHER; note = 2'-deoxy-2'-fluorouridine-3'-phosphorothioate
  modified_base 3: mod_base = OTHER; note = 2'-O-methyladenosine-3'-phosphate
  modified_base 4: mod_base = OTHER; note = 2'-deoxy-2'-fluorouridine-3'-phosphorothioate
  modified_base 5: mod_base = OTHER; note = 2'-O-methyladenosine-3'-phosphate
  modified_base 6: mod_base = OTHER; note = 2'-deoxy-2'-fluoroguanosine-3'-phosphorothioate
  modified_base 7: mod_base = OTHER; note = 2'-O-methyluridine-3'-phosphate
  modified_base 8: mod_base = OTHER; note = 2'-deoxy-2'-fluoroguanosine-3'-phosphorothioate
  modified_base 9: mod_base = OTHER; note = 2'-O-methyladenosine-3'-phosphate
  modified_base 10: mod_base = OTHER; note = 2'-deoxy-2'-fluoroguanosine-3'-phosphorothioate
  modified_base 11: mod_base = OTHER; note = 2'-O-methyluridine-3'-phosphate
  modified_base 12: mod_base = OTHER; note = 2'-O-methyluridine-3'-phosphate
  modified_base 13: mod_base = OTHER; note = 2'-O-methyladenosine-3'-phosphate
  modified_base 14: mod_base = OTHER; note = 2'-deoxy-2'-fluorouridine-3'-phosphorothioate
  modified_base 15: mod_base = OTHER; note = 2'-O-methyluridine-3'-phosphate
  modified_base 16: mod_base = OTHER; note = 2'-deoxy-2'-fluorouridine-3'-phosphorothioate
  modified_base 17: mod_base = OTHER; note = 2'-O-methyluridine-3'-phosphate
  modified_base 18: mod_base = OTHER; note = 2'-deoxy-2'-fluoroguanosine-3'-phosphorothioate
  modified_base 19: mod_base = OTHER; note = 2'-O-methyluridine-3'-phosphate
  modified_base 20: mod_base = OTHER; note = 2'-deoxy-2'-fluorocytidine-3'-phosphorothioate
  modified_base 21: mod_base = OTHER; note = 2'-O-methyladenosine-3'-phosphorothioate
  modified_base 22: mod_base = OTHER; note = 2'-O-methyladenosine-3'-phosphorothioate
  modified_base 23: mod_base = OTHER; note = 2'-O-methyluridine
ttatagtgagttattttgtcaat

SEQ ID NO: 586 - RNA, 23 nt, synthetic construct
  source 1..23: mol_type = other RNA
  modified_base 1: mod_base = OTHER; note = 2'-O-methyladenosine-3'-phosphate
  modified_base 2: mod_base = OTHER; note = 2'-deoxy-2'-fluorouridine-3'-phosphate
  modified_base 3: mod_base = OTHER; note = 2'-O-methyluridine-3'-phosphate
  modified_base 4: mod_base = OTHER; note = 2'-deoxy-2'-fluoroadenosine-3'-phosphate
  modified_base 5: mod_base = OTHER; note = 2'-O-methyluridine-3'-phosphate
  modified_base 6: mod_base = OTHER; note = 2'-deoxy-2'-fluoroadenosine-3'-phosphate
  modified_base 7: mod_base = OTHER; note = 2'-O-methylguanosine-3'-phosphate
  modified_base 8: mod_base = OTHER; note = 2'-deoxy-2'-fluorouridine-3'-phosphate
  modified_base 9: mod_base = OTHER; note = 2'-O-methylguanosine-3'-phosphate
  modified_base 10: mod_base = OTHER; note = 2'-deoxy-2'-fluoroadenosine-3'-phosphate
  modified_base 11: mod_base = OTHER; note = 2'-O-methylguanosine-3'-phosphate
  modified_base 12: mod_base = OTHER; note = 2'-O-methyluridine-3'-phosphate
  modified_base 13: mod_base = OTHER; note = 2'-O-methyluridine-3'-phosphate
  modified_base 14: mod_base = OTHER; note = 2'-deoxy-2'-fluoroadenosine-3'-phosphate
  modified_base 15: mod_base = OTHER; note = 2'-O-methyluridine-3'-phosphate
  modified_base 16: mod_base = OTHER; note = 2'-deoxy-2'-fluorouridine-3'-phosphate
  modified_base 17: mod_base = OTHER; note = 2'-O-methyluridine-3'-phosphate
  modified_base 18: mod_base = OTHER; note = 2'-deoxy-2'-fluorouridine-3'-phosphate
  modified_base 19: mod_base = OTHER; note = 2'-O-methylguanosine-3'-phosphate
  modified_base 20: mod_base = OTHER; note = 2'-deoxy-2'-fluorouridine-3'-phosphate
  modified_base 21: mod_base = OTHER; note = 2'-O-methylcytidine-3'-phosphorothioate
  modified_base 22: mod_base = OTHER; note = 2'-deoxy-2'-fluoroadenosine-3'-phosphorothioate
  modified_base 23: mod_base = OTHER; note = 2'-O-methyladenosine
attatagtgagttattttgtcaa

SEQ ID NO: 587 - RNA, 23 nt, synthetic construct
  source 1..23: mol_type = other RNA
  modified_base 1: mod_base = OTHER; note = 2'-O-methyladenosine-3'-phosphorothioate
  modified_base 2: mod_base = OTHER; note = 2'-deoxy-2'-fluorouridine-3'-phosphorothioate
  modified_base 3: mod_base = OTHER; note = 2'-O-methyluridine-3'-phosphate
  modified_base 4: mod_base = OTHER; note = 2'-deoxy-2'-fluoroadenosine-3'-phosphate
  modified_base 5: mod_base = OTHER; note = 2'-O-methyluridine-3'-phosphate
  modified_base 6: mod_base = OTHER; note = 2'-deoxy-2'-fluoroadenosine-3'-phosphate
  modified_base 7: mod_base = OTHER; note = 2'-O-methylguanosine-3'-phosphate
  modified_base 8: mod_base = OTHER; note = 2'-deoxy-2'-fluorouridine-3'-phosphate
  modified_base 9: mod_base = OTHER; note = 2'-O-methylguanosine-3'-phosphate
  modified_base 10: mod_base = OTHER; note = 2'-deoxy-2'-fluoroadenosine-3'-phosphate
  modified_base 11: mod_base = OTHER; note = 2'-O-methylguanosine-3'-phosphate
  modified_base 12: mod_base = OTHER; note = 2'-O-methyluridine-3'-phosphate
  modified_base 13: mod_base = OTHER; note = 2'-O-methyluridine-3'-phosphate
  modified_base 14: mod_base = OTHER; note = 2'-deoxy-2'-fluoroadenosine-3'-phosphate
  modified_base 15: mod_base = OTHER; note = 2'-O-methyluridine-3'-phosphate
  modified_base 16: mod_base = OTHER; note = 2'-deoxy-2'-fluorouridine-3'-phosphate
  modified_base 17: mod_base = OTHER; note = 2'-O-methyluridine-3'-phosphate
  modified_base 18: mod_base = OTHER; note = 2'-deoxy-2'-fluorouridine-3'-phosphate
  modified_base 19: mod_base = OTHER; note = 2'-O-methylguanosine-3'-phosphate
  modified_base 20: mod_base = OTHER; note = 2'-deoxy-2'-fluorouridine-3'-phosphate
  modified_base 21: mod_base = OTHER; note = 2'-O-methylcytidine-3'-phosphorothioate
  modified_base 22: mod_base = OTHER; note = 2'-O-methyladenosine-3'-phosphorothioate
  modified_base 23: mod_base = OTHER; note = 2'-O-methyladenosine
attatagtgagttattttgtcaa

SEQ ID NO: 588 - RNA, 23 nt, synthetic construct
  source 1..23: mol_type = other RNA
  modified_base 1: mod_base = OTHER; note = 2'-O-methyladenosine-3'-phosphorothioate
  modified_base 2: mod_base = OTHER; note = 2'-deoxy-2'-fluorouridine-3'-phosphorothioate
  modified_base 3: mod_base = OTHER; note = 2'-O-methyluridine-3'-phosphate
  modified_base 4: mod_base = OTHER; note = 2'-deoxy-2'-fluoroadenosine-3'-phosphorothioate
  modified_base 5: mod_base = OTHER; note = 2'-O-methyluridine-3'-phosphate
  modified_base 6: mod_base = OTHER; note = 2'-deoxy-2'-fluoroadenosine-3'-phosphorothioate
  modified_base 7: mod_base = OTHER; note = 2'-O-methylguanosine-3'-phosphate
  modified_base 8: mod_base = OTHER; note = 2'-deoxy-2'-fluorouridine-3'-phosphorothioate
  modified_base 9: mod_base = OTHER; note = 2'-O-methylguanosine-3'-phosphate
  modified_base 10: mod_base = OTHER; note = 2'-deoxy-2'-fluoroadenosine-3'-phosphorothioate
  modified_base 11: mod_base = OTHER; note = 2'-O-methylguanosine-3'-phosphate
  modified_base 12: mod_base = OTHER; note = 2'-O-methyluridine-3'-phosphate
  modified_base 13: mod_base = OTHER; note = 2'-O-methyluridine-3'-phosphate
  modified_base 14: mod_base = OTHER; note = 2'-deoxy-2'-fluoroadenosine-3'-phosphorothioate
  modified_base 15: mod_base = OTHER; note = 2'-O-methyluridine-3'-phosphate
  modified_base 16: mod_base = OTHER; note = 2'-deoxy-2'-fluorouridine-3'-phosphorothioate
  modified_base 17: mod_base = OTHER; note = 2'-O-methyluridine-3'-phosphate
  modified_base 18: mod_base = OTHER; note = 2'-deoxy-2'-fluorouridine-3'-phosphorothioate
  modified_base 19: mod_base = OTHER; note = 2'-O-methylguanosine-3'-phosphate
  modified_base 20: mod_base = OTHER; note = 2'-deoxy-2'-fluorouridine-3'-phosphorothioate
  modified_base 21: mod_base = OTHER; note = 2'-O-methylcytidine-3'-phosphorothioate
  modified_base 22: mod_base = OTHER; note = 2'-O-methyladenosine-3'-phosphorothioate
  modified_base 23: mod_base = OTHER; note = 2'-O-methyladenosine
attatagtgagttattttgtcaa

SEQ ID NO: 589 - RNA, 23 nt, synthetic construct
  source 1..23: mol_type = other RNA
  modified_base 1: mod_base = OTHER; note = 2'-O-methyladenosine-3'-phosphate
  modified_base 2: mod_base = OTHER; note = 2'-deoxy-2'-fluoroadenosine-3'-phosphate
  modified_base 3: mod_base = OTHER; note = 2'-O-methyladenosine-3'-phosphate
  modified_base 4: mod_base = OTHER; note = 2'-deoxy-2'-fluoroadenosine-3'-phosphate
  modified_base 5: mod_base = OTHER; note = 2'-O-methylguanosine-3'-phosphate
  modified_base 6: mod_base = OTHER; note = 2'-deoxy-2'-fluorouridine-3'-phosphate
  modified_base 7: mod_base = OTHER; note = 2'-O-methyluridine-3'-phosphate
  modified_base 8: mod_base = OTHER; note = 2'-deoxy-2'-fluorocytidine-3'-phosphate
  modified_base 9: mod_base = OTHER; note = 2'-O-methyladenosine-3'-phosphate
  modified_base 10: mod_base = OTHER; note = 2'-deoxy-2'-fluoroadenosine-3'-phosphate
  modified_base 11: mod_base = OTHER; note = 2'-O-methyladenosine-3'-phosphate
  modified_base 12: mod_base = OTHER; note = 2'-O-methyluridine-3'-phosphate
  modified_base 13: mod_base = OTHER; note = 2'-O-methyladenosine-3'-phosphate
  modified_base 14: mod_base = OTHER; note = 2'-deoxy-2'-fluorouridine-3'-phosphate
  modified_base 15: mod_base = OTHER; note = 2'-O-methylcytidine-3'-phosphate
  modified_base 16: mod_base = OTHER; note = 2'-deoxy-2'-fluorocytidine-3'-phosphate
  modified_base 17: mod_base = OTHER; note = 2'-O-methylguanosine-3'-phosphate
  modified_base 18: mod_base = OTHER; note = 2'-deoxy-2'-fluoroguanosine-3'-phosphate
  modified_base 19: mod_base = OTHER; note = 2'-O-methyladenosine-3'-phosphate
  modified_base 20: mod_base = OTHER; note = 2'-deoxy-2'-fluoroadenosine-3'-phosphate
  modified_base 21: mod_base = OTHER; note = 2'-O-methylcytidine-3'-phosphorothioate
  modified_base 22: mod_base = OTHER; note = 2'-deoxy-2'-fluorocytidine-3'-phosphorothioate
  modified_base 23: mod_base = OTHER; note = 2'-O-methylguanosine
aaaagttcaaatatccggaaccg

SEQ ID NO: 590 - RNA, 23 nt, synthetic construct
  source 1..23: mol_type = other RNA
  modified_base 1: mod_base = OTHER; note = 2'-O-methyladenosine-3'-phosphorothioate
  modified_base 2: mod_base = OTHER; note = 2'-deoxy-2'-fluoroadenosine-3'-phosphorothioate
  modified_base 3: mod_base = OTHER; note = 2'-O-methyladenosine-3'-phosphate
  modified_base 4: mod_base = OTHER; note = 2'-deoxy-2'-fluoroadenosine-3'-phosphate
  modified_base 5: mod_base = OTHER; note = 2'-O-methylguanosine-3'-phosphate
  modified_base 6: mod_base = OTHER; note = 2'-deoxy-2'-fluorouridine-3'-phosphate
  modified_base 7: mod_base = OTHER; note = 2'-O-methyluridine-3'-phosphate
  modified_base 8: mod_base = OTHER; note = 2'-deoxy-2'-fluorocytidine-3'-phosphate
  modified_base 9: mod_base = OTHER; note = 2'-O-methyladenosine-3'-phosphate
  modified_base 10: mod_base = OTHER; note = 2'-deoxy-2'-fluoroadenosine-3'-phosphate
  modified_base 11: mod_base = OTHER; note = 2'-O-methyladenosine-3'-phosphate
  modified_base 12: mod_base = OTHER; note = 2'-O-methyluridine-3'-phosphate
  modified_base 13: mod_base = OTHER; note = 2'-O-methyladenosine-3'-phosphate
  modified_base 14: mod_base = OTHER; note = 2'-deoxy-2'-fluorouridine-3'-phosphate
  modified_base 15: mod_base = OTHER; note = 2'-O-methylcytidine-3'-phosphate
  modified_base 16: mod_base = OTHER; note = 2'-deoxy-2'-fluorocytidine-3'-phosphate
  modified_base 17: mod_base = OTHER; note = 2'-O-methylguanosine-3'-phosphate
  modified_base 18: mod_base = OTHER; note = 2'-deoxy-2'-fluoroguanosine-3'-phosphate
  modified_base 19: mod_base = OTHER; note = 2'-O-methyladenosine-3'-phosphate
  modified_base 20: mod_base = OTHER; note = 2'-deoxy-2'-fluoroadenosine-3'-phosphate
  modified_base 21: mod_base = OTHER; note = 2'-O-methylcytidine-3'-phosphorothioate
  modified_base 22: mod_base = OTHER; note = 2'-O-methylcytidine-3'-phosphorothioate
  modified_base 23: mod_base = OTHER; note = 2'-O-methylguanosine
aaaagttcaaatatccggaaccg

SEQ ID NO: 591 - RNA, 23 nt, synthetic construct
  source 1..23: mol_type = other RNA
  modified_base 1: mod_base = OTHER; note = 2'-O-methyladenosine-3'-phosphorothioate
  modified_base 2: mod_base = OTHER; note = 2'-deoxy-2'-fluoroadenosine-3'-phosphorothioate
  modified_base 3: mod_base = OTHER; note = 2'-O-methyladenosine-3'-phosphate
  modified_base 4: mod_base = OTHER; note = 2'-deoxy-2'-fluoroadenosine-3'-phosphorothioate
  modified_base 5: mod_base = OTHER; note = 2'-O-methylguanosine-3'-phosphate
  modified_base 6: mod_base = OTHER; note = 2'-deoxy-2'-fluorouridine-3'-phosphorothioate
  modified_base 7: mod_base = OTHER; note = 2'-O-methyluridine-3'-phosphate
  modified_base 8: mod_base = OTHER; note = 2'-deoxy-2'-fluorocytidine-3'-phosphorothioate
  modified_base 9: mod_base = OTHER; note = 2'-O-methyladenosine-3'-phosphate
  modified_base 10: mod_base = OTHER; note = 2'-deoxy-2'-fluoroadenosine-3'-phosphorothioate
  modified_base 11: mod_base = OTHER; note = 2'-O-methyladenosine-3'-phosphate
  modified_base 12: mod_base = OTHER; note = 2'-O-methyluridine-3'-phosphate
  modified_base 13: mod_base = OTHER; note = 2'-O-methyladenosine-3'-phosphate
  modified_base 14: mod_base = OTHER; note = 2'-deoxy-2'-fluorouridine-3'-phosphorothioate
  modified_base 15: mod_base = OTHER; note = 2'-O-methylcytidine-3'-phosphate
  modified_base 16: mod_base = OTHER; note = 2'-deoxy-2'-fluorocytidine-3'-phosphorothioate
  modified_base 17: mod_base = OTHER; note = 2'-O-methylguanosine-3'-phosphate
  modified_base 18: mod_base = OTHER; note = 2'-deoxy-2'-fluoroguanosine-3'-phosphorothioate
  modified_base 19: mod_base = OTHER; note = 2'-O-methyladenosine-3'-phosphate
  modified_base 20: mod_base = OTHER; note = 2'-deoxy-2'-fluoroadenosine-3'-phosphorothioate
  modified_base 21: mod_base = OTHER; note = 2'-O-methylcytidine-3'-phosphorothioate
  modified_base 22: mod_base = OTHER; note = 2'-O-methylcytidine-3'-phosphorothioate
  modified_base 23: mod_base = OTHER; note = 2'-O-methylguanosine
aaaagttcaaatatccggaaccg

SEQ ID NO: 592 - RNA, 23 nt, synthetic construct
  source 1..23: mol_type = other RNA
  modified_base 1: mod_base = OTHER; note = 2'-O-methyluridine-3'-phosphate
  modified_base 2: mod_base = OTHER; note = 2'-deoxy-2'-fluoroguanosine-3'-phosphate
  modified_base 3: mod_base = OTHER; note = 2'-O-methyladenosine-3'-phosphate
  modified_base 4: mod_base = OTHER; note = 2'-deoxy-2'-fluoroadenosine-3'-phosphate
  modified_base 5: mod_base = OTHER; note = 2'-O-methyladenosine-3'-phosphate
  modified_base 6: mod_base = OTHER; note = 2'-deoxy-2'-fluorouridine-3'-phosphate
  modified_base 7: mod_base = OTHER; note = 2'-O-methyluridine-3'-phosphate
  modified_base 8: mod_base = OTHER; note = 2'-deoxy-2'-fluoroguanosine-3'-phosphate
  modified_base 9: mod_base = OTHER; note = 2'-O-methyluridine-3'-phosphate
  modified_base 10: mod_base = OTHER; note = 2'-deoxy-2'-fluoroguanosine-3'-phosphate
  modified_base 11: mod_base = OTHER; note = 2'-O-methyluridine-3'-phosphate
  modified_base 12: mod_base = OTHER; note = 2'-O-methyluridine-3'-phosphate
  modified_base 13: mod_base = OTHER; note = 2'-O-methyluridine-3'-phosphate
  modified_base 14: mod_base = OTHER; note = 2'-deoxy-2'-fluoroguanosine-3'-phosphate
  modified_base 15: mod_base = OTHER; note = 2'-O-methyladenosine-3'-phosphate
  modified_base 16: mod_base = OTHER; note = 2'-deoxy-2'-fluorouridine-3'-phosphate
  modified_base 17: mod_base = OTHER; note = 2'-O-methylcytidine-3'-phosphate
  modified_base 18: mod_base = OTHER; note = 2'-deoxy-2'-fluorouridine-3'-phosphate
  modified_base 19: mod_base = OTHER; note = 2'-O-methylguanosine-3'-phosphate
  modified_base 20: mod_base = OTHER; note = 2'-deoxy-2'-fluorocytidine-3'-phosphate
  modified_base 21: mod_base = OTHER; note = 2'-O-methyladenosine-3'-phosphorothioate
  modified_base 22: mod_base = OTHER; note = 2'-deoxy-2'-fluoroguanosine-3'-phosphorothioate
  modified_base 23: mod_base = OTHER; note = 2'-O-methyladenosine
tgaaattgtgtttgatctgcaga

SEQ ID NO: 593 - RNA, 23 nt, synthetic construct
  source 1..23: mol_type = other RNA
  modified_base 1: mod_base = OTHER; note = 2'-O-methyluridine-3'-phosphorothioate
  modified_base 2: mod_base = OTHER; note = 2'-deoxy-2'-fluoroguanosine-3'-phosphorothioate
  modified_base 3: mod_base = OTHER; note = 2'-O-methyladenosine-3'-phosphate
  modified_base 4: mod_base = OTHER; note = 2'-deoxy-2'-fluoroadenosine-3'-phosphate
  modified_base 5: mod_base = OTHER; note = 2'-O-methyladenosine-3'-phosphate
  modified_base 6: mod_base = OTHER; note = 2'-deoxy-2'-fluorouridine-3'-phosphate
  modified_base 7: mod_base = OTHER; note = 2'-O-methyluridine-3'-phosphate
  modified_base 8: mod_base = OTHER; note = 2'-deoxy-2'-fluoroguanosine-3'-phosphate
  modified_base 9: mod_base = OTHER; note = 2'-O-methyluridine-3'-phosphate
  modified_base 10: mod_base = OTHER; note = 2'-deoxy-2'-fluoroguanosine-3'-phosphate
  modified_base 11: mod_base = OTHER; note = 2'-O-methyluridine-3'-phosphate
  modified_base 12: mod_base = OTHER; note = 2'-O-methyluridine-3'-phosphate
  modified_base 13: mod_base = OTHER; note = 2'-O-methyluridine-3'-phosphate
  modified_base 14: mod_base = OTHER; note = 2'-deoxy-2'-fluoroguanosine-3'-phosphate
  modified_base 15: mod_base = OTHER; note = 2'-O-methyladenosine-3'-phosphate
  modified_base 16: mod_base = OTHER; note = 2'-deoxy-2'-fluorouridine-3'-phosphate
  modified_base 17: mod_base = OTHER; note = 2'-O-methylcytidine-3'-phosphate
  modified_base 18: mod_base = OTHER; note = 2'-deoxy-2'-fluorouridine-3'-phosphate
  modified_base 19: mod_base = OTHER; note = 2'-O-methylguanosine-3'-phosphate
  modified_base 20: mod_base = OTHER; note = 2'-deoxy-2'-fluorocytidine-3'-phosphate
  modified_base 21: mod_base = OTHER; note = 2'-O-methyladenosine-3'-phosphorothioate
  modified_base 22: mod_base = OTHER; note = 2'-O-methylguanosine-3'-phosphorothioate
  modified_base 23: mod_base = OTHER; note = 2'-O-methyladenosine
tgaaattgtgtttgatctgcaga

SEQ ID NO: 594 - RNA, 23 nt, synthetic construct
  source 1..23: mol_type = other RNA
  modified_base 1: mod_base = OTHER; note = 2'-O-methyluridine-3'-phosphorothioate
  modified_base 2: mod_base = OTHER; note = 2'-deoxy-2'-fluoroguanosine-3'-phosphorothioate
  modified_base 3: mod_base = OTHER; note = 2'-O-methyladenosine-3'-phosphate
  modified_base 4: mod_base = OTHER; note = 2'-deoxy-2'-fluoroadenosine-3'-phosphorothioate
  modified_base 5: mod_base = OTHER; note = 2'-O-methyladenosine-3'-phosphate
  modified_base 6: mod_base = OTHER; note = 2'-deoxy-2'-fluorouridine-3'-phosphorothioate
  modified_base 7: mod_base = OTHER; note = 2'-O-methyluridine-3'-phosphate
  modified_base 8: mod_base = OTHER; note = 2'-deoxy-2'-fluoroguanosine-3'-phosphorothioate
  modified_base 9: mod_base = OTHER; note = 2'-O-methyluridine-3'-phosphate
  modified_base 10: mod_base = OTHER; note = 2'-deoxy-2'-fluoroguanosine-3'-phosphorothioate
  modified_base 11: mod_base = OTHER; note = 2'-O-methyluridine-3'-phosphate
  modified_base 12: mod_base = OTHER; note = 2'-O-methyluridine-3'-phosphate
  modified_base 13: mod_base = OTHER; note = 2'-O-methyluridine-3'-phosphate
  modified_base 14: mod_base = OTHER; note = 2'-deoxy-2'-fluoroguanosine-3'-phosphorothioate
  modified_base 15: mod_base = OTHER; note = 2'-O-methyladenosine-3'-phosphate
  modified_base 16: mod_base = OTHER; note = 2'-deoxy-2'-fluorouridine-3'-phosphorothioate
  modified_base 17: mod_base = OTHER; note = 2'-O-methylcytidine-3'-phosphate
  modified_base 18: mod_base = OTHER; note = 2'-deoxy-2'-fluorouridine-3'-phosphorothioate
  modified_base 19: mod_base = OTHER; note = 2'-O-methylguanosine-3'-phosphate
  modified_base 20: mod_base = OTHER; note = 2'-deoxy-2'-fluorocytidine-3'-phosphorothioate
  modified_base 21: mod_base = OTHER; note = 2'-O-methyladenosine-3'-phosphorothioate
  modified_base 22: mod_base = OTHER; note = 2'-O-methylguanosine-3'-phosphorothioate
  modified_base 23: mod_base = OTHER; note = 2'-O-methyladenosine
tgaaattgtgtttgatctgcaga

SEQ ID NO: 595 - RNA, 23 nt, synthetic construct
  source 1..23: mol_type = other RNA
  modified_base 1: mod_base = OTHER; note = 2'-O-methyluridine-3'-phosphate
  modified_base 2: mod_base = OTHER; note = 2'-deoxy-2'-fluoroadenosine-3'-phosphate
  modified_base 3: mod_base = OTHER; note = 2'-O-methyluridine-3'-phosphate
  modified_base 4: mod_base = OTHER; note = 2'-deoxy-2'-fluorouridine-3'-phosphate
  modified_base 5: mod_base = OTHER; note = 2'-O-methyladenosine-3'-phosphate
  modified_base 6: mod_base = OTHER; note = 2'-deoxy-2'-fluorouridine-3'-phosphate
  modified_base 7: mod_base = OTHER; note = 2'-O-methyladenosine-3'-phosphate
  modified_base 8: mod_base = OTHER; note = 2'-deoxy-2'-fluoroadenosine-3'-phosphate
  modified_base 9: mod_base = OTHER; note = 2'-O-methyladenosine-3'-phosphate
  modified_base 10: mod_base = OTHER; note = 2'-deoxy-2'-fluoroadenosine-3'-phosphate
  modified_base 11: mod_base = OTHER; note = 2'-O-methyladenosine-3'-phosphate
  modified_base 12: mod_base = OTHER; note = 2'-O-methyluridine-3'-phosphate
  modified_base 13: mod_base = OTHER; note = 2'-O-methyladenosine-3'-phosphate
  modified_base 14: mod_base = OTHER; note = 2'-deoxy-2'-fluorouridine-3'-phosphate
  modified_base 15: mod_base = OTHER; note = 2'-O-methylcytidine-3'-phosphate
  modified_base 16: mod_base = OTHER; note = 2'-deoxy-2'-fluorouridine-3'-phosphate
  modified_base 17: mod_base = OTHER; note = 2'-O-methyluridine-3'-phosphate
  modified_base 18: mod_base = OTHER; note = 2'-deoxy-2'-fluoroguanosine-3'-phosphate
  modified_base 19: mod_base = OTHER; note = 2'-O-methylcytidine-3'-phosphate
  modified_base 20: mod_base = OTHER; note = 2'-deoxy-2'-fluorouridine-3'-phosphate
  modified_base 21: mod_base = OTHER; note = 2'-O-methyluridine-3'-phosphorothioate
  modified_base 22: mod_base = OTHER; note = 2'-deoxy-2'-fluorouridine-3'-phosphorothioate
  modified_base 23: mod_base = OTHER; note = 2'-O-methyluridine
tattataaaaatatcttgctttt

SEQ ID NO: 596 - RNA, 23 nt, synthetic construct
  source 1..23: mol_type = other RNA
  modified_base 1: mod_base = OTHER; note = 2'-O-methyluridine-3'-phosphorothioate
  modified_base 2: mod_base = OTHER; note = 2'-deoxy-2'-fluoroadenosine-3'-phosphorothioate
  modified_base 3: mod_base = OTHER; note = 2'-O-methyluridine-3'-phosphate
  modified_base 4: mod_base = OTHER; note = 2'-deoxy-2'-fluorouridine-3'-phosphate
  modified_base 5: mod_base = OTHER; note = 2'-O-methyladenosine-3'-phosphate
  modified_base 6: mod_base = OTHER; note = 2'-deoxy-2'-fluorouridine-3'-phosphate
  modified_base 7: mod_base = OTHER; note = 2'-O-methyladenosine-3'-phosphate
  modified_base 8: mod_base = OTHER; note = 2'-deoxy-2'-fluoroadenosine-3'-phosphate
  modified_base 9: mod_base = OTHER; note = 2'-O-methyladenosine-3'-phosphate
  modified_base 10: mod_base = OTHER; note = 2'-deoxy-2'-fluoroadenosine-3'-phosphate
  modified_base 11: mod_base = OTHER; note = 2'-O-methyladenosine-3'-phosphate
  modified_base 12: mod_base = OTHER; note = 2'-O-methyluridine-3'-phosphate
  modified_base 13: mod_base = OTHER; note = 2'-O-methyladenosine-3'-phosphate
  modified_base 14: mod_base = OTHER; note = 2'-deoxy-2'-fluorouridine-3'-phosphate
  modified_base 15: mod_base = OTHER; note = 2'-O-methylcytidine-3'-phosphate
  modified_base 16: mod_base = OTHER; note = 2'-deoxy-2'-fluorouridine-3'-phosphate
  modified_base 17: mod_base = OTHER; note = 2'-O-methyluridine-3'-phosphate
  modified_base 18: mod_base = OTHER; note = 2'-deoxy-2'-fluoroguanosine-3'-phosphate
  modified_base 19: mod_base = OTHER; note = 2'-O-methylcytidine-3'-phosphate
  modified_base 20: mod_base = OTHER; note = 2'-deoxy-2'-fluorouridine-3'-phosphate
  modified_base 21: mod_base = OTHER; note = 2'-O-methyluridine-3'-phosphorothioate
  modified_base 22: mod_base = OTHER; note = 2'-O-methyluridine-3'-phosphorothioate
  modified_base 23: mod_base = OTHER; note = 2'-O-methyluridine
tattataaaaatatcttgctttt

SEQ ID NO: 597 - RNA, 23 nt, synthetic construct
  source 1..23: mol_type = other RNA
  modified_base 1: mod_base = OTHER; note = 2'-O-methyluridine-3'-phosphorothioate
  modified_base 2: mod_base = OTHER; note = 2'-deoxy-2'-fluoroadenosine-3'-phosphorothioate
  modified_base 3: mod_base = OTHER; note = 2'-O-methyluridine-3'-phosphate
  modified_base 4: mod_base = OTHER; note = 2'-deoxy-2'-fluorouridine-3'-phosphorothioate
  modified_base 5: mod_base = OTHER; note = 2'-O-methyladenosine-3'-phosphate
  modified_base 6: mod_base = OTHER; note = 2'-deoxy-2'-fluorouridine-3'-phosphorothioate
  modified_base 7: mod_base = OTHER; note = 2'-O-methyladenosine-3'-phosphate
  modified_base 8: mod_base = OTHER; note = 2'-deoxy-2'-fluoroadenosine-3'-phosphorothioate
  modified_base 9: mod_base = OTHER; note = 2'-O-methyladenosine-3'-phosphate
  modified_base 10: mod_base = OTHER; note = 2'-deoxy-2'-fluoroadenosine-3'-phosphorothioate
  modified_base 11: mod_base = OTHER; note = 2'-O-methyladenosine-3'-phosphate
  modified_base 12: mod_base = OTHER; note = 2'-O-methyluridine-3'-phosphate
  modified_base 13: mod_base = OTHER; note = 2'-O-methyladenosine-3'-phosphate
  modified_base 14: mod_base = OTHER; note = 2'-deoxy-2'-fluorouridine-3'-phosphorothioate
  modified_base 15: mod_base = OTHER; note = 2'-O-methylcytidine-3'-phosphate
  modified_base 16: mod_base = OTHER; note = 2'-deoxy-2'-fluorouridine-3'-phosphorothioate
  modified_base 17: mod_base = OTHER; note = 2'-O-methyluridine-3'-phosphate
  modified_base 18: mod_base = OTHER; note = 2'-deoxy-2'-fluoroguanosine-3'-phosphorothioate
  modified_base 19: mod_base = OTHER; note = 2'-O-methylcytidine-3'-phosphate
  modified_base 20: mod_base = OTHER; note = 2'-deoxy-2'-fluorouridine-3'-phosphorothioate
  modified_base 21: mod_base = OTHER; note = 2'-O-methyluridine-3'-phosphorothioate
  modified_base 22: mod_base = OTHER; note = 2'-O-methyluridine-3'-phosphorothioate
  modified_base 23: mod_base = OTHER; note = 2'-O-methyluridine
tattataaaaatatcttgctttt

SEQ ID NO: 598 - RNA, 23 nt, synthetic construct
  source 1..23: mol_type = other RNA
  modified_base 1: mod_base = OTHER; note = 2'-O-methyladenosine-3'-phosphate
  modified_base 2: mod_base = OTHER; note = 2'-deoxy-2'-fluorocytidine-3'-phosphate
  modified_base 3: mod_base = OTHER; note = 2'-O-methyluridine-3'-phosphate
  modified_base 4: mod_base = OTHER; note = 2'-deoxy-2'-fluoroguanosine-3'-phosphate
  modified_base 5: mod_base = OTHER; note = 2'-O-methyladenosine-3'-phosphate
  modified_base 6: mod_base = OTHER; note = 2'-deoxy-2'-fluoroadenosine-3'-phosphate
  modified_base 7: mod_base = OTHER; note = 2'-O-methyladenosine-3'-phosphate
  modified_base 8: mod_base = OTHER; note = 2'-deoxy-2'-fluorouridine-3'-phosphate
  modified_base 9: mod_base = OTHER; note = 2'-O-methyluridine-3'-phosphate
  modified_base 10: mod_base = OTHER; note = 2'-deoxy-2'-fluoroguanosine-3'-phosphate
  modified_base 11: mod_base = OTHER; note = 2'-O-methyluridine-3'-phosphate
  modified_base 12: mod_base = OTHER; note = 2'-O-methylguanosine-3'-phosphate
  modified_base 13: mod_base = OTHER; note = 2'-O-methyluridine-3'-phosphate
  modified_base 14: mod_base = OTHER; note = 2'-deoxy-2'-fluorouridine-3'-phosphate
  modified_base 15: mod_base = OTHER; note = 2'-O-methyluridine-3'-phosphate
  modified_base 16: mod_base = OTHER; note = 2'-deoxy-2'-fluoroguanosine-3'-phosphate
  modified_base 17: mod_base = OTHER; note = 2'-O-methyladenosine-3'-phosphate
  modified_base 18: mod_base = OTHER; note = 2'-deoxy-2'-fluorouridine-3'-phosphate
  modified_base 19: mod_base = OTHER; note = 2'-O-methylcytidine-3'-phosphate
  modified_base 20: mod_base = OTHER; note = 2'-deoxy-2'-fluorouridine-3'-phosphate
  modified_base 21: mod_base = OTHER; note = 2'-O-methylguanosine-3'-phosphorothioate
  modified_base 22: mod_base = OTHER; note = 2'-deoxy-2'-fluorocytidine-3'-phosphorothioate
  modified_base 23: mod_base = OTHER; note = 2'-O-methyladenosine
actgaaattgtgtttgatctgca

SEQ ID NO: 599 - RNA, 23 nt, synthetic construct
  source 1..23: mol_type = other RNA
  modified_base 1: mod_base = OTHER; note = 2'-O-methyladenosine-3'-phosphorothioate
  modified_base 2: mod_base = OTHER; note = 2'-deoxy-2'-fluorocytidine-3'-phosphorothioate
  modified_base 3: mod_base = OTHER; note = 2'-O-methyluridine-3'-phosphate
  modified_base 4: mod_base = OTHER; note = 2'-deoxy-2'-fluoroguanosine-3'-phosphate
  modified_base 5: mod_base = OTHER; note = 2'-O-methyladenosine-3'-phosphate
  modified_base 6: mod_base = OTHER; note = 2'-deoxy-2'-fluoroadenosine-3'-phosphate
  modified_base 7: mod_base = OTHER; note = 2'-O-methyladenosine-3'-phosphate
  modified_base 8: mod_base = OTHER; note = 2'-deoxy-2'-fluorouridine-3'-phosphate
  modified_base 9: mod_base = OTHER; note = 2'-O-methyluridine-3'-phosphate
  modified_base 10: mod_base = OTHER; note = 2'-deoxy-2'-fluoroguanosine-3'-phosphate
  modified_base 11: mod_base = OTHER; note = 2'-O-methyluridine-3'-phosphate
  modified_base 12: mod_base = OTHER; note = 2'-O-methylguanosine-3'-phosphate
  modified_base 13: mod_base = OTHER; note = 2'-O-methyluridine-3'-phosphate
  modified_base 14: mod_base = OTHER; note = 2'-deoxy-2'-fluorouridine-3'-phosphate
  modified_base 15: mod_base = OTHER; note = 2'-O-methyluridine-3'-phosphate
  modified_base 16: mod_base = OTHER; note = 2'-deoxy-2'-fluoroguanosine-3'-phosphate
  modified_base 17: mod_base = OTHER; note = 2'-O-methyladenosine-3'-phosphate
  modified_base 18: mod_base = OTHER; note = 2'-deoxy-2'-fluorouridine-3'-phosphate
  modified_base 19: mod_base = OTHER; note = 2'-O-methylcytidine-3'-phosphate
  modified_base 20: mod_base = OTHER; note = 2'-deoxy-2'-fluorouridine-3'-phosphate
  modified_base 21: mod_base = OTHER; note = 2'-O-methylguanosine-3'-phosphorothioate
  modified_base 22: mod_base = OTHER; note = 2'-O-methylcytidine-3'-phosphorothioate
  modified_base 23: mod_base = OTHER; note = 2'-O-methyladenosine
actgaaattgtgtttgatctgca

SEQ ID NO: 600 - RNA, 23 nt, synthetic construct
  source 1..23: mol_type = other RNA
  modified_base 1: mod_base = OTHER; note = 2'-O-methyladenosine-3'-phosphorothioate
  modified_base 2: mod_base = OTHER; note = 2'-deoxy-2'-fluorocytidine-3'-phosphorothioate
  modified_base 3: mod_base = OTHER; note = 2'-O-methyluridine-3'-phosphate
  modified_base 4: mod_base = OTHER; note = 2'-deoxy-2'-fluoroguanosine-3'-phosphorothioate
  modified_base 5: mod_base = OTHER; note = 2'-O-methyladenosine-3'-phosphate
  modified_base 6: mod_base = OTHER; note = 2'-deoxy-2'-fluoroadenosine-3'-phosphorothioate
  modified_base 7: mod_base = OTHER; note = 2'-O-methyladenosine-3'-phosphate
  modified_base 8: mod_base = OTHER; note = 2'-deoxy-2'-fluorouridine-3'-phosphorothioate
  modified_base 9: mod_base = OTHER; note = 2'-O-methyluridine-3'-phosphate
  modified_base 10: mod_base = OTHER; note = 2'-deoxy-2'-fluoroguanosine-3'-phosphorothioate
  modified_base 11: mod_base = OTHER; note = 2'-O-methyluridine-3'-phosphate
  modified_base 12: mod_base = OTHER; note = 2'-O-methylguanosine-3'-phosphate
  modified_base 13: mod_base = OTHER; note = 2'-O-methyluridine-3'-phosphate
  modified_base 14: mod_base = OTHER; note = 2'-deoxy-2'-fluorouridine-3'-phosphorothioate
  modified_base 15: mod_base = OTHER; note = 2'-O-methyluridine-3'-phosphate
  modified_base 16: mod_base = OTHER; note = 2'-deoxy-2'-fluoroguanosine-3'-phosphorothioate
  modified_base 17: mod_base = OTHER; note = 2'-O-methyladenosine-3'-phosphate
  modified_base 18: mod_base = OTHER; note = 2'-deoxy-2'-fluorouridine-3'-phosphorothioate
  modified_base 19: mod_base = OTHER; note = 2'-O-methylcytidine-3'-phosphate
  modified_base 20: mod_base = OTHER; note = 2'-deoxy-2'-fluorouridine-3'-phosphorothioate
  modified_base 21: mod_base = OTHER; note = 2'-O-methylguanosine-3'-phosphorothioate
  modified_base 22: mod_base = OTHER; note = 2'-O-methylcytidine-3'-phosphorothioate
  modified_base 23: mod_base = OTHER; note = 2'-O-methyladenosine
actgaaattgtgtttgatctgca

SEQ ID NO: 601 - RNA, 19 nt, synthetic construct
  source 1..19: mol_type = other RNA
tatccgtggtttcctgcta

SEQ ID NO: 602 - RNA, 19 nt, synthetic construct
  source 1..19: mol_type = other RNA
ggtttcctgctacctccaa

SEQ ID NO: 603 - RNA, 19 nt, synthetic construct
  source 1..19: mol_type = other RNA
cctccaaccatgggccttt

SEQ ID NO: 604 - RNA, 19 nt, synthetic construct
  source 1..19: mol_type = other RNA
gggccttttgggaatactt

SEQ ID NO: 605 - RNA, 19 nt, synthetic construct
  source 1..19: mol_type = other RNA
ggaatactttgttttttaa

SEQ ID NO: 606 - RNA, 19 nt, synthetic construct
  source 1..19: mol_type = other RNA
ctttgttttttaatcttcc

SEQ ID NO: 607 - RNA, 19 nt, synthetic construct
  source 1..19: mol_type = other RNA
cttcctggggaaaacctgg

SEQ ID NO: 608 - RNA, 19 nt, synthetic construct
  source 1..19: mol_type = other RNA
ggaaaacctggggacagga

SEQ ID NO: 609 - RNA, 19 nt, synthetic construct
  source 1..19: mol_type = other RNA
gggacaggagcaaacatat

SEQ ID NO: 610 - RNA, 19 nt, synthetic construct
  source 1..19: mol_type = other RNA
caaacatatgtcatttcag

SEQ ID NO: 611 - RNA, 19 nt, synthetic construct
  source 1..19: mol_type = other RNA
catttcagcaccaaaaata

SEQ ID NO: 612 - RNA, 19 nt, synthetic construct
  source 1..19: mol_type = other RNA
gcaccaaaaatattccgtg

SEQ ID NO: 613 - RNA, 19 nt, synthetic construct
  source 1..19: mol_type = other RNA
ccgtgttggagcatctgaa

SEQ ID NO: 614 - RNA, 19 nt, synthetic construct
  source 1..19: mol_type = other RNA
ggagcatctgaaaatattg

SEQ ID NO: 615 - RNA, 19 nt, synthetic construct
  source 1..19: mol_type = other RNA
gaaaatattgtgattcaag

SEQ ID NO: 616 - RNA, 19 nt, synthetic construct
  source 1..19: mol_type = other RNA
gattcaagtttatggatac

SEQ ID NO: 617 - RNA, 19 nt, synthetic construct
  source 1..19: mol_type = other RNA
ggatacactgaagcatttg

SEQ ID NO: 618 - RNA, 19 nt, synthetic construct
  source 1..19: mol_type = other RNA
gaagcatttgatgcaacaa

SEQ ID NO: 619 - RNA, 19 nt, synthetic construct
  source 1..19: mol_type = other RNA
tgcaacaatctctattaaa

SEQ ID NO: 620 - RNA, 19 nt, synthetic construct
  source 1..19: mol_type = other RNA
aatctctattaaaagttat

SEQ ID NO: 621 - RNA, 19 nt, synthetic construct
  source 1..19: mol_type = other RNA
aagttatcctgataaaaaa

SEQ ID NO: 622 - RNA, 19 nt, synthetic construct
  source 1..19: mol_type = other RNA
ctgataaaaaatttagtta

SEQ ID NO: 623 - RNA, 19 nt, synthetic construct
  source 1..19: mol_type = other RNA
ttagttactcctcaggcca

SEQ ID NO: 624 - RNA, 19 nt, synthetic construct
  source 1..19: mol_type = other RNA
cctcaggccatgttcattt

SEQ ID NO: 625 - RNA, 19 nt, synthetic construct
  source 1..19: mol_type = other RNA
ttcatttatcctcagagaa

SEQ ID NO: 626 - RNA, 19 nt, synthetic construct
  source 1..19: mol_type = other RNA
ctcagagaataaattccaa

SEQ ID NO: 627 - RNA, 19 nt, synthetic construct
  source 1..19: mol_type = other RNA
aataaattccaaaactctg

SEQ ID NO: 628 - RNA, 19 nt, synthetic construct
  source 1..19: mol_type = other RNA
ctctgcaatcttaacaata

SEQ ID NO: 629 - RNA, 19 nt, synthetic construct
  source 1..19: mol_type = other RNA
cttaacaatacaaccaaaa

SEQ ID NO: 630 - RNA, 19 nt, synthetic construct
  source 1..19: mol_type = other RNA
caaccaaaacaattgcctg

SEQ ID NO: 631 - RNA, 19 nt, synthetic construct
  source 1..19: mol_type = other RNA
caattgcctggaggacaaa

SEQ ID NO: 632 - RNA, 19 nt, synthetic construct
  source 1..19: mol_type = other RNA
ggacaaaacccagtttctt

SEQ ID NO: 633 - RNA, 19 nt, synthetic construct
  source 1..19: mol_type = other RNA
ccagtttcttatgtgtatt

SEQ ID NO: 634 - RNA, 19 nt, synthetic construct
  source 1..19: mol_type = other RNA
atgtgtatttggaagttgt

SEQ ID NO: 635 - RNA, 19 nt, synthetic construct
  source 1..19: mol_type = other RNA
ggaagttgtatcaaagcat

SEQ ID NO: 636 - RNA, 19 nt, synthetic construct
  source 1..19: mol_type = other RNA
gtatcaaagcatttttcaa

SEQ ID NO: 637 - RNA, 19 nt, synthetic construct
  source 1..19: mol_type = other RNA
ttttcaaaatcaaaaagaa

SEQ ID NO: 638 - RNA, 19 nt, synthetic construct
  source 1..19: mol_type = other RNA
caaaaagaatgccaataac

SEQ ID NO: 639 - RNA, 19 nt, synthetic construct
  source 1..19: mol_type = other RNA
gccaataacctatgacaat

SEQ ID NO: 640 - RNA, 19 nt, synthetic construct
  source 1..19: mol_type = other RNA
cctatgacaatggatttct

SEQ ID NO: 641 - RNA, 19 nt, synthetic construct
  source 1..19: mol_type = other RNA
tggatttctcttcattcat

SEQ ID NO: 642 - RNA, 19 nt, synthetic construct
  source 1..19: mol_type = other RNA
cattcatacagacaaacct

SEQ ID NO: 643 - RNA, 19 nt, synthetic construct
  source 1..19: mol_type = other RNA
cagacaaacctgtttatac

SEQ ID NO: 644 - RNA, 19 nt, synthetic construct
  source 1..19: mol_type = other RNA
gtttatactccagaccagt

SEQ ID NO: 645 - RNA, 19 nt, synthetic construct
  source 1..19: mol_type = other RNA
agaccagtcagtaaaagtt

SEQ ID NO: 646 - RNA, 19 nt, synthetic construct
  source 1..19: mol_type = other RNA
agtaaaagttagagtttat

SEQ ID NO: 647 - RNA, 19 nt, synthetic construct
  source 1..19: mol_type = other RNA
agagtttattcgttgaatg

SEQ ID NO: 648 - RNA, 19 nt, synthetic construct
  source 1..19: mol_type = other RNA
cgttgaatgacgacttgaa

SEQ ID NO: 649 - RNA, 19 nt, synthetic construct
  source 1..19: mol_type = other RNA
cttgaagccagccaaaaga

SEQ ID NO: 650 - RNA, 19 nt, synthetic construct
  source 1..19: mol_type = other RNA
ccagccaaaagagaaactg

SEQ ID NO: 651 - RNA, 19 nt, synthetic construct
  source 1..19: mol_type = other RNA
aaactgtcttaactttcat

SEQ ID NO: 652 - RNA, 19 nt, synthetic construct
  source 1..19: mol_type = other RNA
aactttcatagatcctgaa

SEQ ID NO: 653 - RNA, 19 nt, synthetic construct
  source 1..19: mol_type = other RNA
catagatcctgaaggatca

SEQ ID NO: 654 - RNA, 19 nt, synthetic construct
  source 1..19: mol_type = other RNA
gaaggatcagaagttgaca

SEQ ID NO: 655 - RNA, 19 nt, synthetic construct
  source 1..19: mol_type = other RNA
tgacatggtagaagaaatt

SEQ ID NO: 656 - RNA, 19 nt, synthetic construct
  source 1..19: mol_type = other RNA
gaagaaattgatcatattg

SEQ ID NO: 657 - RNA, 19 nt, synthetic construct
  source 1..19: mol_type = other RNA
gatcatattggaattatct

SEQ ID NO: 658 - RNA, 19 nt, synthetic construct
  source 1..19: mol_type = other RNA
ggaattatctcttttcctg

SEQ ID NO: 659 - RNA, 19 nt, synthetic construct
  source 1..19: mol_type = other RNA
ctcttttcctgacttcaag

SEQ ID NO: 660 - RNA, 19 nt, synthetic construct
  source 1..19: mol_type = other RNA
acttcaagattccgtctaa

SEQ ID NO: 661 - RNA, 19 nt, synthetic construct
  source 1..19: mol_type = other RNA
ccgtctaatcctagatatg

SEQ ID NO: 662 - RNA, 19 nt, synthetic construct
  source 1..19: mol_type = other RNA
cctagatatggtatgtgga

SEQ ID NO: 663 - RNA, 19 nt, synthetic construct
  source 1..19: mol_type = other RNA
tgtggacgatcaaggctaa

SEQ ID NO: 664 - RNA, 19 nt, synthetic construct
  source 1..19: mol_type = other RNA
cgatcaaggctaaatataa

SEQ ID NO: 665 - RNA, 19 nt, synthetic construct
  source 1..19: mol_type = other RNA
atataaagaggacttttca

SEQ ID NO: 666 - RNA, 19 nt, synthetic construct
  source 1..19: mol_type = other RNA
gaggacttttcaacaactg

SEQ ID NO: 667 - RNA, 19 nt, synthetic construct
  source 1..19: mol_type = other RNA
caactggaaccgcatattt

SEQ ID NO: 668 - RNA, 19 nt, synthetic construct
  source 1..19: mol_type = other RNA
cgcatattttgaagttaaa

SEQ ID NO: 669 - RNA, 19 nt, synthetic construct
  source 1..19: mol_type = other RNA
aagttaaagaatatgtctt

SEQ ID NO: 670 - RNA, 19 nt, synthetic construct
  source 1..19: mol_type = other RNA
gaatatgtcttgccacatt

SEQ ID NO: 671 - RNA, 19 nt, synthetic construct
  source 1..19: mol_type = other RNA
ccacatttttctgtctcaa

SEQ ID NO: 672 - RNA, 19 nt, synthetic construct
  source 1..19: mol_type = other RNA
ctgtctcaatcgagccaga

SEQ ID NO: 673 - RNA, 19 nt, synthetic construct
  source 1..19: mol_type = other RNA
caatcgagccagaatataa

SEQ ID NO: 674 - RNA, 19 nt, synthetic construct
  source 1..19: mol_type = other RNA
gaatataatttcattggtt

SEQ ID NO: 675 - RNA, 19 nt, synthetic construct
  source 1..19: mol_type = other RNA
attggttacaagaacttta

SEQ ID NO: 676 - RNA, 19 nt, synthetic construct
  source 1..19: mol_type = other RNA
agaactttaagaattttga

SEQ ID NO: 677 - RNA, 19 nt, synthetic construct
  source 1..19: mol_type = other RNA
gaattttgaaattactata

SEQ ID NO: 678 - RNA, 19 nt, synthetic construct
  source 1..19: mol_type = other RNA
gaaattactataaaagcaa

SEQ ID NO: 679 - RNA, 19 nt, synthetic construct
  source 1..19: mol_type = other RNA
aaagcaagatatttttata

SEQ ID NO: 680 - RNA, 19 nt, synthetic construct
  source 1..19: mol_type = other RNA
atatttttataataaagta

SEQ ID NO: 681 - RNA, 19 nt, synthetic construct
  source 1..19: mol_type = other RNA
aagtagtcactgaggctga

SEQ ID NO: 682 - RNA, 19 nt, synthetic construct
  source 1..19: mol_type = other RNA
cactgaggctgacgtttat

SEQ ID NO: 683 - RNA, 19 nt, synthetic construct
  source 1..19: mol_type = other RNA
cgtttatatcacatttgga

SEQ ID NO: 684 - RNA, 19 nt, synthetic construct
  source 1..19: mol_type = other RNA
cacatttggaataagagaa

SEQ ID NO: 685 - RNA, 19 nt, synthetic construct
  source 1..19: mol_type = other RNA
aataagagaagacttaaaa

SEQ ID NO: 686 - RNA, 19 nt, synthetic construct
  source 1..19: mol_type = other RNA
cttaaaagatgatcaaaaa

SEQ ID NO: 687 - RNA, 19 nt, synthetic construct
  source 1..19: mol_type = other RNA
gatgatcaaaaagaaatga

SEQ ID NO: 688 - RNA, 19 nt, synthetic construct
  source 1..19: mol_type = other RNA
aaatgatgcaaacagcaat

SEQ ID NO: 689 - RNA, 19 nt, synthetic construct
  source 1..19: mol_type = other RNA
acagcaatgcaaaacacaa

SEQ ID NO: 690 - RNA, 19 nt, synthetic construct
  source 1..19: mol_type = other RNA
aaaacacaatgttgataaa

SEQ ID NO: 691 - RNA, 19 nt, synthetic construct
  source 1..19: mol_type = other RNA
caatgttgataaatggaat

SEQ ID NO: 692 - RNA, 19 nt, synthetic construct
  source 1..19: mol_type = other RNA
ggaattgctcaagtcacat

SEQ ID NO: 693 - RNA, 19 nt, synthetic construct
  source 1..19: mol_type = other RNA
gctcaagtcacatttgatt

SEQ ID NO: 694 - RNA, 19 nt, synthetic construct
  source 1..19: mol_type = other RNA
atttgattctgaaacagca

SEQ ID NO: 695 - RNA, 19 nt, synthetic construct
  source 1..19: mol_type = other RNA
tgaaacagcagtcaaagaa

SEQ ID NO: 696 - RNA, 19 nt, synthetic construct
  source 1..19: mol_type = other RNA
caaagaactgtcatactac

SEQ ID NO: 697 - RNA, 19 nt, synthetic construct
  source 1..19: mol_type = other RNA
catactacagtttagaaga

SEQ ID NO: 698 - RNA, 19 nt, synthetic construct
  source 1..19: mol_type = other RNA
cagtttagaagatttaaac

SEQ ID NO: 699 - RNA, 19 nt, synthetic construct
  source 1..19: mol_type = other RNA
taaacaacaagtaccttta

SEQ ID NO: 700 - RNA, 19 nt, synthetic construct
  source 1..19: mol_type = other RNA
caagtacctttatattgct

SEQ ID NO: 701 - RNA, 19 nt, synthetic construct
  source 1..19: mol_type = other RNA
tattgctgtaacagtcata

SEQ ID NO: 702 - RNA, 19 nt, synthetic construct
  source 1..19: mol_type = other RNA
aacagtcatagagtctaca

SEQ ID NO: 703 - RNA, 19 nt, synthetic construct
  source 1..19: mol_type = other RNA
agagtctacaggtggattt

SEQ ID NO: 704 - RNA, 19 nt, synthetic construct
  source 1..19: mol_type = other RNA
ggattttctgaagaggcag

SEQ ID NO: 705 - RNA, 19 nt, synthetic construct
  source 1..19: mol_type = other RNA
gaagaggcagaaatacctg

SEQ ID NO: 706 - RNA, 19 nt, synthetic construct
  source 1..19: mol_type = other RNA
agaaatacctggcatcaaa

SEQ ID NO: 707 - RNA, 19 nt, synthetic construct
  source 1..19: mol_type = other RNA
gcatcaaatatgtcctctc

SEQ ID NO: 708 - RNA, 19 nt, synthetic construct
  source 1..19: mol_type = other RNA
tgtcctctctccctacaaa

SEQ ID NO: 709 - RNA, 19 nt, synthetic construct
  source 1..19: mol_type = other RNA
gaatttggttgctactcct

SEQ ID NO: 710 - RNA, 19 nt, synthetic construct
  source 1..19: mol_type = other RNA
gctactcctcttttcctga

SEQ ID NO: 711 - RNA, 19 nt, synthetic construct
  source 1..19: mol_type = other RNA
ctcttttcctgaagcctgg

SEQ ID NO: 712 - RNA, 19 nt, synthetic construct
  source 1..19: mol_type = other RNA
cctgggattccatatccca

SEQ ID NO: 713 - RNA, 19 nt, synthetic construct
  source 1..19: mol_type = other RNA
catatcccatcaaggtgca

SEQ ID NO: 714 - RNA, 19 nt, synthetic construct
  source 1..19: mol_type = other RNA
ccatcaaggtgcaggttaa

SEQ ID NO: 715 - RNA, 19 nt, synthetic construct
  source 1..19: mol_type = other RNA
caggttaaagattcgcttg

SEQ ID NO: 716 - RNA, 19 nt, synthetic construct
  source 1..19: mol_type = other RNA
ttcgcttgaccagttggta

SEQ ID NO: 717 - RNA, 19 nt, synthetic construct
  source 1..19: mol_type = other RNA
ccagttggtaggaggagtc

SEQ ID NO: 718 - RNA, 19 nt, synthetic construct
  source 1..19: mol_type = other RNA
ggaggagtcccagtaacac

SEQ ID NO: 719 - RNA, 19 nt, synthetic construct
  source 1..19: mol_type = other RNA
cagtaacactgaatgcaca

SEQ ID NO: 720 - RNA, 19 nt, synthetic construct
  source 1..19: mol_type = other RNA
gaatgcacaaacaattgat

SEQ ID NO: 721 - RNA, 19 nt, synthetic construct
  source 1..19: mol_type = other RNA
aacaattgatgtaaaccaa

SEQ ID NO: 722 - RNA, 19 nt, synthetic construct
  source 1..19: mol_type = other RNA
taaaccaagagacatctga

SEQ ID NO: 723 - RNA, 19 nt, synthetic construct
  source 1..19: mol_type = other RNA
catctgacttggatccaag

SEQ ID NO: 724 - RNA, 19 nt, synthetic construct
  source 1..19: mol_type = other RNA
gatccaagcaaaagtgtaa

SEQ ID NO: 725 - RNA, 19 nt, synthetic construct
  source 1..19: mol_type = other RNA
caaaagtgtaacacgtgtt

SEQ ID NO: 726 - RNA, 19 nt, synthetic construct
  source 1..19: mol_type = other RNA
aacacgtgttgatgatgga

SEQ ID NO: 727 - RNA, 19 nt, synthetic construct
  source 1..19: mol_type = other RNA
tgatggagtagcttccttt

SEQ ID NO: 728 - RNA, 19 nt, synthetic construct
  source 1..19: mol_type = other RNA
gtagcttcctttgtgctta

SEQ ID NO: 729 - RNA, 19 nt, synthetic construct
  source 1..19: mol_type = other RNA
gcttaatctcccatctgga

SEQ ID NO: 730 - RNA, 19 nt, synthetic construct
  source 1..19: mol_type = other RNA
ccatctggagtgacggtgc

SEQ ID NO: 731 - RNA, 19 nt, synthetic construct
  source 1..19: mol_type = other RNA
tgacggtgctggagtttaa

SEQ ID NO: 732 - RNA, 19 nt, synthetic construct
  source 1..19: mol_type = other RNA
gctggagtttaatgtcaaa

SEQ ID NO: 733 - RNA, 19 nt, synthetic construct
  source 1..19: mol_type = other RNA
tgtcaaaactgatgctcca

SEQ ID NO: 734 - RNA, 19 nt, synthetic construct
  source 1..19: mol_type = other RNA
gatgctccagatcttccag

SEQ ID NO: 735 - RNA, 19 nt, synthetic construct
  source 1..19: mol_type = other RNA
cagatcttccagaagaaaa

SEQ ID NO: 736 - RNA, 19 nt, synthetic construct
  source 1..19: mol_type = other RNA
agaaaatcaggccagggaa

SEQ ID NO: 737 - RNA, 19 nt, synthetic construct
  source 1..19: mol_type = other RNA
ggccagggaaggttaccga

SEQ ID NO: 738 - RNA, 19 nt, synthetic construct
  source 1..19: mol_type = other RNA
gttaccgagcaatagcata

SEQ ID NO: 739 - RNA, 19 nt, synthetic construct
  source 1..19: mol_type = other RNA
atagcatactcatctctca

SEQ ID NO: 740 - RNA, 19 nt, synthetic construct
  source 1..19: mol_type = other RNA
tactcatctctcagccaaa

SEQ ID NO: 741 - RNA, 19 nt, synthetic construct
  source 1..19: mol_type = other RNA
gccaaagttacctttatat

SEQ ID NO: 742 - RNA, 19 nt, synthetic construct
  source 1..19: mol_type = other RNA
cctttatattgattggact

SEQ ID NO: 743 - RNA, 19 nt, synthetic construct
  source 1..19: mol_type = other RNA
gattggactgataaccata

SEQ ID NO: 744 - RNA, 19 nt, synthetic construct
  source 1..19: mol_type = other RNA
ctgataaccataaggcttt

SEQ ID NO: 745 - RNA, 19 nt, synthetic construct
  source 1..19: mol_type = other RNA
aggctttgctagtgggaga

SEQ ID NO: 746 - RNA, 19 nt, synthetic construct
  source 1..19: mol_type = other RNA
gtgggagaacatctgaata

SEQ ID NO: 747 - RNA, 19 nt, synthetic construct
  source 1..19: mol_type = other RNA
catctgaatattattgtta

SEQ ID NO: 748 - RNA, 19 nt, synthetic construct
  source 1..19: mol_type = other RNA
tattattgttacccccaaa

SEQ ID NO: 749 - RNA, 19 nt, synthetic construct
  source 1..19: mol_type = other RNA
cccaaaagcccatatattg

SEQ ID NO: 750 - RNA, 19 nt, synthetic construct
  source 1..19: mol_type = other RNA
ccaaaagcccatatattga

SEQ ID NO: 751 - RNA, 19 nt, synthetic construct
  source 1..19: mol_type = other RNA
caaaagcccatatattgac

SEQ ID NO: 752 - RNA, 19 nt, synthetic construct
  source 1..19: mol_type = other RNA
aaaagcccatatattgaca

SEQ ID NO: 753 - RNA, 19 nt, synthetic construct
  source 1..19: mol_type = other RNA
aaagcccatatattgacaa

SEQ ID NO: 754 - RNA, 19 nt, synthetic construct
  source 1..19: mol_type = other RNA
aagcccatatattgacaaa

SEQ ID NO: 755 - RNA, 19 nt, synthetic construct
  source 1..19: mol_type = other RNA
agcccatatattgacaaaa

SEQ ID NO: 756 - RNA, 19 nt, synthetic construct
  source 1..19: mol_type = other RNA
gcccatatattgacaaaat

SEQ ID NO: 757 - RNA, 19 nt, synthetic construct
  source 1..19: mol_type = other RNA
cccatatattgacaaaata

SEQ ID NO: 758 - RNA, 19 nt, synthetic construct
  source 1..19: mol_type = other RNA
ccatatattgacaaaataa

SEQ ID NO: 759 - RNA, 19 nt, synthetic construct
  source 1..19: mol_type = other RNA
catatattgacaaaataac

SEQ ID NO: 760 - RNA, 19 nt, synthetic construct
  source 1..19: mol_type = other RNA
atatattgacaaaataact

SEQ ID NO: 761 - RNA, 19 nt, synthetic construct
  source 1..19: mol_type = other RNA
tatattgacaaaataactc

SEQ ID NO: 762 - RNA, 19 nt, synthetic construct
  source 1..19: mol_type = other RNA
atattgacaaaataactca

SEQ ID NO: 763 - RNA, 19 nt, synthetic construct
  source 1..19: mol_type = other RNA
tattgacaaaataactcac

SEQ ID NO: 764 - RNA, 19 nt, synthetic construct
  source 1..19: mol_type = other RNA
attgacaaaataactcact

SEQ ID NO: 765 - RNA, 19 nt, synthetic construct
  source 1..19: mol_type = other RNA
ttgacaaaataactcacta

SEQ ID NO: 766 - RNA, 19 nt, synthetic construct
  source 1..19: mol_type = other RNA
tgacaaaataactcactat

SEQ ID NO: 767 - RNA, 19 nt, synthetic construct
  source 1..19: mol_type = other RNA
gacaaaataactcactata

SEQ ID NO: 768 - RNA, 19 nt, synthetic construct
  source 1..19: mol_type = other RNA
aaaataactcactataatt

SEQ ID NO: 769 - RNA, 19 nt, synthetic construct
  source 1..19: mol_type = other RNA
aaataactcactataatta

SEQ ID NO: 770 - RNA, 19 nt, synthetic construct
  source 1..19: mol_type = other RNA
aataactcactataattac

SEQ ID NO: 771 - RNA, 19 nt, synthetic construct
  source 1..19: mol_type = other RNA
ataactcactataattact

SEQ ID NO: 772 - RNA, 19 nt, synthetic construct
  source 1..19: mol_type = other RNA
aactcactataattacttg

SEQ ID NO: 773 - RNA, 19 nt, synthetic construct
  source 1..19: mol_type = other RNA
actcactataattacttga

SEQ ID NO: 774 - RNA, 19 nt, synthetic construct
  source 1..19: mol_type = other RNA
ctcactataattacttgat

SEQ ID NO: 775 - RNA, 19 nt, synthetic construct
  source 1..19: mol_type = other RNA
tcactataattacttgatt

SEQ ID NO: 776 - RNA, 19 nt, synthetic construct
  source 1..19: mol_type = other RNA
actataattacttgatttt

SEQ ID NO: 777 - RNA, 19 nt, synthetic construct
  source 1..19: mol_type = other RNA
ctataattacttgatttta

SEQ ID NO: 778 - RNA, 19 nt, synthetic construct
  source 1..19: mol_type = other RNA
tataattacttgattttat

SEQ ID NO: 779 - RNA, 19 nt, synthetic construct
  source 1..19: mol_type = other RNA
ataattacttgattttatc

SEQ ID NO: 780 - RNA, 19 nt, synthetic construct
  source 1..19: mol_type = other RNA
taattacttgattttatcc

SEQ ID NO: 781 - RNA, 19 nt, synthetic construct
  source 1..19: mol_type = other RNA
aattacttgattttatcca

SEQ ID NO: 782 - RNA, 19 nt, synthetic construct
  source 1..19: mol_type = other RNA
attacttgattttatccaa

SEQ ID NO: 783 - RNA, 19 nt, synthetic construct
  source 1..19: mol_type = other RNA
ttatccaagggcaaaatta

SEQ ID NO: 784 - RNA, 19 nt, synthetic construct
  source 1..19: mol_type = other RNA
gcaaaattatccactttgg

SEQ ID NO: 785 - RNA, 19 nt, synthetic construct
  source 1..19: mol_type = other RNA
cactttggcacgagggaga

SEQ ID NO: 786 - RNA, 19 nt, synthetic construct
  source 1..19: mol_type = other RNA
cgagggagaaattttcaga

SEQ ID NO: 787 - RNA, 19 nt, synthetic construct
  source 1..19: mol_type = other RNA
attttcagatgcatcttat

SEQ ID NO: 788 - RNA, 19 nt, synthetic construct
  source 1..19: mol_type = other RNA
gcatcttatcaaagtataa

SEQ ID NO: 789 - RNA, 19 nt, synthetic construct
  source 1..19: mol_type = other RNA
caaagtataaacattccag

SEQ ID NO: 790 - RNA, 19 nt, synthetic construct
  source 1..19: mol_type = other RNA
attccagtaacacagaaca

SEQ ID NO: 791 - RNA, 19 nt, synthetic construct
  source 1..19: mol_type = other RNA
cacagaacatggttccttc

SEQ ID NO: 792 - RNA, 19 nt, synthetic construct
  source 1..19: mol_type = other RNA
ggttccttcatcccgactt

SEQ ID NO: 793 - RNA, 19 nt, synthetic construct
  source 1..19: mol_type = other RNA
cccgacttctggtctatta

SEQ ID NO: 794 - RNA, 19 nt, synthetic construct
  source 1..19: mol_type = other RNA
ggtctattacatcgtcaca

SEQ ID NO: 795 - RNA, 19 nt, synthetic construct
  source 1..19: mol_type = other RNA
atcgtcacaggagaacaga

SEQ ID NO: 796 - RNA, 19 nt, synthetic construct
  source 1..19: mol_type = other RNA
caggagaacagacagcaga

SEQ ID NO: 797 - RNA, 19 nt, synthetic construct
  source 1..19: mol_type = other RNA
cagcagaattagtgtctga

SEQ ID NO: 798 - RNA, 19 nt, synthetic construct
  source 1..19: mol_type = other RNA
gtgtctgattcagtctggt

SEQ ID NO: 799 - RNA, 19 nt, synthetic construct
  source 1..19: mol_type = other RNA
cagtctggttaaatattga

SEQ ID NO: 800 - RNA, 19 nt, synthetic construct
  source 1..19: mol_type = other RNA
gttaaatattgaagaaaaa

SEQ ID NO: 801 - RNA, 19 nt, synthetic construct
  source 1..19: mol_type = other RNA
agaaaaatgtggcaaccag

SEQ ID NO: 802 - RNA, 19 nt, synthetic construct
  source 1..19: mol_type = other RNA
gcaaccagctccaggttca

SEQ ID NO: 803 - RNA, 19 nt, synthetic construct
  source 1..19: mol_type = other RNA
gctccaggttcatctgtct

SEQ ID NO: 804 - RNA, 19 nt, synthetic construct
  source 1..19: mol_type = other RNA
atctgtctcctgatgcaga

SEQ ID NO: 805 - RNA, 19 nt, synthetic construct
  source 1..19: mol_type = other RNA
gatgcagatgcatattctc

SEQ ID NO: 806 - RNA, 19 nt, synthetic construct
  source 1..19: mol_type = other RNA
gcatattctccaggccaaa

SEQ ID NO: 807 - RNA, 19 nt, synthetic construct
  source 1..19: mol_type = other RNA
aggccaaactgtgtctctt

SEQ ID NO: 808 - RNA, 19 nt, synthetic construct
  source 1..19: mol_type = other RNA
gtgtctcttaatatggcaa

SEQ ID NO: 809 - RNA, 19 nt, synthetic construct
  source 1..19: mol_type = other RNA
ttaatatggcaactggaat

SEQ ID NO: 810 - RNA, 19 nt, synthetic construct
  source 1..19: mol_type = other RNA
aactggaatggattcctgg

SEQ ID NO: 811 - RNA, 19 nt, synthetic construct
  source 1..19: mol_type = other RNA
ttcctgggtggcattagca

SEQ ID NO: 812 - RNA, 19 nt, synthetic construct
  source 1..19: mol_type = other RNA
ggcattagcagcagtggac

SEQ ID NO: 813 - RNA, 19 nt, synthetic construct
  source 1..19: mol_type = other RNA
agtggacagtgctgtgtat

SEQ ID NO: 814 - RNA, 19 nt, synthetic construct
  source 1..19: mol_type = other RNA
gctgtgtatggagtccaaa

SEQ ID NO: 815 - RNA, 19 nt, synthetic construct
  source 1..19: mol_type = other RNA
agtccaaagaggagccaaa

SEQ ID NO: 816 - RNA, 19 nt, synthetic construct
  source 1..19: mol_type = other RNA
agaggagccaaaaagccct

SEQ ID NO: 817 - RNA, 19 nt, synthetic construct
  source 1..19: mol_type = other RNA
agcccttggaaagagtatt

SEQ ID NO: 818 - RNA, 19 nt, synthetic construct
  source 1..19: mol_type = other RNA
aagagtatttcaattctta

SEQ ID NO: 819 - RNA, 19 nt, synthetic construct
  source 1..19: mol_type = other RNA
tttcaattcttagagaaga

SEQ ID NO: 820 - RNA, 19 nt, synthetic construct
  source 1..19: mol_type = other RNA
gagaagagtgatctgggct

SEQ ID NO: 821 - RNA, 19 nt, synthetic construct
  source 1..19: mol_type = other RNA
tgatctgggctgtggggca

SEQ ID NO: 822 - RNA, 19 nt, synthetic construct
  source 1..19: mol_type = other RNA
ggggcaggtggtggcctca

SEQ ID NO: 823 - RNA, 19 nt, synthetic construct
  source 1..19: mol_type = other RNA
gtggcctcaacaatgccaa

SEQ ID NO: 824 - RNA, 19 nt, synthetic construct
  source 1..19: mol_type = other RNA
caacaatgccaatgtgttc

SEQ ID NO: 825 - RNA, 19 nt, synthetic construct
  source 1..19: mol_type = other RNA
caatgtgttccacctagct

SEQ ID NO: 826 - RNA, 19 nt, synthetic construct
  source 1..19: mol_type = other RNA
cacctagctggacttacct

SEQ ID NO: 827 - RNA, 19 nt, synthetic construct
  source 1..19: mol_type = other RNA
gacttaccttcctcactaa

SEQ ID NO: 828 - RNA, 19 nt, synthetic construct
  source 1..19: mol_type = other RNA
tcactaatgcaaatgcaga

SEQ ID NO: 829 - RNA, 19 nt, synthetic construct
  source 1..19: mol_type = other RNA
aaatgcagatgactcccaa

SEQ ID NO: 830 - RNA, 19 nt, synthetic construct
  source 1..19: mol_type = other RNA
ctcccaagaaaatgatgaa

SEQ ID NO: 831 - RNA, 19 nt, synthetic construct
  source 1..19: mol_type = other RNA
ccttgtaaagaaattctca

SEQ ID NO: 832 - RNA, 19 nt, synthetic construct
  source 1..19: mol_type = other RNA
aattctcaggccaagaaga

SEQ ID NO: 833 - RNA, 19 nt, synthetic construct
  source 1..19: mol_type = other RNA
ccaagaagaacgctgcaaa

SEQ ID NO: 834 - RNA, 19 nt, synthetic construct
  source 1..19: mol_type = other RNA
cgctgcaaaagaagataga

SEQ ID NO: 835 - RNA, 19 nt, synthetic construct
  source 1..19: mol_type = other RNA
aaagaagatagaagaaata

SEQ ID NO: 836 - RNA, 19 nt, synthetic construct
  source 1..19: mol_type = other RNA
agaaatagctgctaaatat

SEQ ID NO: 837 - RNA, 19 nt, synthetic construct
  source 1..19: mol_type = other RNA
gctgctaaatataaacatt

SEQ ID NO: 838 - RNA, 19 nt, synthetic construct
  source 1..19: mol_type = other RNA
acattcagtagtgaagaaa

SEQ ID NO: 839 - RNA, 19 nt, synthetic construct
  source 1..19: mol_type = other RNA
gtagtgaagaaatgttgtt

SEQ ID NO: 840 - RNA, 19 nt, synthetic construct
  source 1..19: mol_type = other RNA
aaatgttgttacgatggag

SEQ ID NO: 841 - RNA, 19 nt, synthetic construct
  source 1..19: mol_type = other RNA
cgatggagcctgcgttaat

SEQ ID NO: 842 - RNA, 19 nt, synthetic construct
  source 1..19: mol_type = other RNA
cgttaataatgatgaaacc

SEQ ID NO: 843 - RNA, 19 nt, synthetic construct
  source 1..19: mol_type = other RNA
atgatgaaacctgtgagca

SEQ ID NO: 844 - RNA, 19 nt, synthetic construct
  source 1..19: mol_type = other RNA
ctgtgagcagcgagctgca

SEQ ID NO: 845 - RNA, 19 nt, synthetic construct
  source 1..19: mol_type = other RNA
cgagctgcacggattagtt

SEQ ID NO: 846 - RNA, 19 nt, synthetic construct
  source 1..19: mol_type = other RNA
ggattagtttagggccaag

SEQ ID NO: 847 - RNA, 19 nt, synthetic construct
  source 1..19: mol_type = other RNA
gggccaagatgcatcaaag

SEQ ID NO: 848 - RNA, 19 nt, synthetic construct
  source 1..19: mol_type = other RNA
catcaaagctttcactgaa

SEQ ID NO: 849 - RNA, 19 nt, synthetic construct
  source 1..19: mol_type = other RNA
gctttcactgaatgttgtg

SEQ ID NO: 850 - RNA, 19 nt, synthetic construct
  source 1..19: mol_type = other RNA
aatgttgtgtcgtcgcaag

SEQ ID NO: 851 - RNA, 19 nt, synthetic construct
  source 1..19: mol_type = other RNA
cgtcgcaagccagctccgt

SEQ ID NO: 852 - RNA, 19 nt, synthetic construct
  source 1..19: mol_type = other RNA
gctccgtgctaatatctct

SEQ ID NO: 853 - RNA, 19 nt, synthetic construct
  source 1..19: mol_type = other RNA
ctaatatctctcataaaga

SEQ ID NO: 854 - RNA, 19 nt, synthetic construct
  source 1..19: mol_type = other RNA
aaagacatgcaattgggaa

SEQ ID NO: 855 - RNA, 19 nt, synthetic construct
  source 1..19: mol_type = other RNA
caattgggaaggctacaca

SEQ ID NO: 856 - RNA, 19 nt, synthetic construct
  source 1..19: mol_type = other RNA
gctacacatgaagaccctg

SEQ ID NO: 857 - RNA, 19 nt, synthetic construct
  source 1..19: mol_type = other RNA
catgaagaccctgttacca

SEQ ID NO: 858 - RNA, 19 nt, synthetic construct
  source 1..19: mol_type = other RNA
taccagtaagcaagccaga

SEQ ID NO: 859 - RNA, 19 nt, synthetic construct
  source 1..19: mol_type = other RNA
agcaagccagaaattcgga

SEQ ID NO: 860 - RNA, 19 nt, synthetic construct
  source 1..19: mol_type = other RNA
agaaattcggagttatttt

SEQ ID NO: 861 - RNA, 19 nt, synthetic construct
  source 1..19: mol_type = other RNA
agttattttccagaaagct

SEQ ID NO: 862 - RNA, 19 nt, synthetic construct
  source 1..19: mol_type = other RNA
cagaaagctggttgtggga

SEQ ID NO: 863 - RNA, 19 nt, synthetic construct
  source 1..19: mol_type = other RNA
gtgggaagttcatcttgtt

SEQ ID NO: 864 - RNA, 19 nt, synthetic construct
  source 1..19: mol_type = other RNA
tcatcttgttcccagaaga

SEQ ID NO: 865 - RNA, 19 nt, synthetic construct
  source 1..19: mol_type = other RNA
ccagaagaaaacagttgca

SEQ ID NO: 866 - RNA, 19 nt, synthetic construct
  source 1..19: mol_type = other RNA
cagttgcagtttgccctac

SEQ ID NO: 867 - RNA, 19 nt, synthetic construct
  source 1..19: mol_type = other RNA
cagtttgccctacctgatt

SEQ ID NO: 868 - RNA, 19 nt, synthetic construct
  source 1..19: mol_type = other RNA
cctgattctctaaccacct

SEQ ID NO: 869 - RNA, 19 nt, synthetic construct
  source 1..19: mol_type = other RNA
accacctgggaaattcaag

SEQ ID NO: 870 - RNA, 19 nt, synthetic construct
  source 1..19: mol_type = other RNA
gaaattcaaggcgttggca

SEQ ID NO: 871 - RNA, 19 nt, synthetic construct
  source 1..19: mol_type = other RNA
cgttggcatttcaaacact

SEQ ID NO: 872 - RNA, 19 nt, synthetic construct
  source 1..19: mol_type = other RNA
catttcaaacactggtata

SEQ ID NO: 873 - RNA, 19 nt, synthetic construct
  source 1..19: mol_type = other RNA
gtatatgtgttgctgatac

SEQ ID NO: 874 - RNA, 19 nt, synthetic construct
  source 1..19: mol_type = other RNA
tgctgatactgtcaaggca

SEQ ID NO: 875 - RNA, 19 nt, synthetic construct
  source 1..19: mol_type = other RNA
ctgtcaaggcaaaggtgtt

SEQ ID NO: 876 - RNA, 19 nt, synthetic construct
  source 1..19: mol_type = other RNA
aggtgttcaaagatgtctt

SEQ ID NO: 877 - RNA, 19 nt, synthetic construct
  source 1..19: mol_type = other RNA
caaagatgtcttcctggaa

SEQ ID NO: 878 - RNA, 19 nt, synthetic construct
  source 1..19: mol_type = other RNA
cttcctggaaatgaatata

SEQ ID NO: 879 - RNA, 19 nt, synthetic construct
  source 1..19: mol_type = other RNA
gaatataccatattctgtt

SEQ ID NO: 880 - RNA, 19 nt, synthetic construct
  source 1..19: mol_type = other RNA
atattctgttgtacgagga

SEQ ID NO: 881 - RNA, 19 nt, synthetic construct
  source 1..19: mol_type = other RNA
cgaggagaacagatccaat

SEQ ID NO: 882 - RNA, 19 nt, synthetic construct
  source 1..19: mol_type = other RNA
gaacagatccaattgaaag

SEQ ID NO: 883 - RNA, 19 nt, synthetic construct
  source 1..19: mol_type = other RNA
gaaaggaactgtttacaac

SEQ ID NO: 884 - RNA, 19 nt, synthetic construct
  source 1..19: mol_type = other RNA
actgtttacaactatagga

SEQ ID NO: 885 - RNA, 19 nt, synthetic construct
  source 1..19: mol_type = other RNA
aactataggacttctggga

SEQ ID NO: 886 - RNA, 19 nt, synthetic construct
  source 1..19: mol_type = other RNA
tgggatgcagttctgtgtt

SEQ ID NO: 887 - RNA, 19 nt, synthetic construct
  source 1..19: mol_type = other RNA
gttctgtgttaaaatgtct

SEQ ID NO: 888 - RNA, 19 nt, synthetic construct
  source 1..19: mol_type = other RNA
ttaaaatgtctgctgtgga

SEQ ID NO: 889 - RNA, 19 nt, synthetic construct
  source 1..19: mol_type = other RNA
ctgtggagggaatctgcac

SEQ ID NO: 890 - RNA, 19 nt, synthetic construct
  source 1..19: mol_type = other RNA
ggaatctgcacttcggaaa

SEQ ID NO: 891 - RNA, 19 nt, synthetic construct
  source 1..19: mol_type = other RNA
cggaaagcccagtcattga

SEQ ID NO: 892 - RNA, 19 nt, synthetic construct
  source 1..19: mol_type = other RNA
ccagtcattgatcatcagg

SEQ ID NO: 893 - RNA, 19 nt, synthetic construct
  source 1..19: mol_type = other RNA
catcagggcacaaagtcct

SEQ ID NO: 894 - RNA, 19 nt, synthetic construct
  source 1..19: mol_type = other RNA
ggcacaaagtcctccaaat

SEQ ID NO: 895 - RNA, 19 nt, synthetic construct
  source 1..19: mol_type = other RNA
caaatgtgtgcgccagaaa

SEQ ID NO: 896 - RNA, 19 nt, synthetic construct
  source 1..19: mol_type = other RNA
gcgccagaaagtagagggc

SEQ ID NO: 897 - RNA, 19 nt, synthetic construct
  source 1..19: mol_type = other RNA
agtagagggctcctccagt

SEQ ID NO: 898 - RNA, 19 nt, synthetic construct
  source 1..19: mol_type = other RNA
cctccagtcacttggtgac

SEQ ID NO: 899 - RNA, 19 nt, synthetic construct
  source 1..19: mol_type = other RNA
tcacttggtgacattcact

SEQ ID NO: 900 - RNA, 19 nt, synthetic construct
  source 1..19: mol_type = other RNA
cattcactgtgcttcctct

SEQ ID NO: 901 - RNA, 19 nt, synthetic construct
  source 1..19: mol_type = other RNA
ggaaattggccttcacaac

SEQ ID NO: 902 - RNA, 19 nt, synthetic construct
  source 1..19: mol_type = other RNA
cttcacaacatcaattttt

SEQ ID NO: 903 - RNA, 19 nt, synthetic construct
  source 1..19: mol_type = other RNA
aatttttcactggagactt

SEQ ID NO: 904 - RNA, 19 nt, synthetic construct
  source 1..19: mol_type = other RNA
ctggagacttggtttggaa

SEQ ID NO: 905 - RNA, 19 nt, synthetic construct
  source 1..19: mol_type = other RNA
ggtttggaaaagaaatctt

SEQ ID NO: 906 - RNA, 19 nt, synthetic construct
  source 1..19: mol_type = other RNA
aatcttagtaaaaacatta

SEQ ID NO: 907 - RNA, 19 nt, synthetic construct
  source 1..19: mol_type = other RNA
aaaaacattacgagtggtg

SEQ ID NO: 908 - RNA, 19 nt, synthetic construct
  source 1..19: mol_type = other RNA
gagtggtgccagaaggtgt

SEQ ID NO: 909 - RNA, 19 nt, synthetic construct
  source 1..19: mol_type = other RNA
agaaggtgtcaaaagggaa

SEQ ID NO: 910 - RNA, 19 nt, synthetic construct
  source 1..19: mol_type = other RNA
tgtcaaaagggaaagctat

SEQ ID NO: 911 - RNA, 19 nt, synthetic construct
  source 1..19: mol_type = other RNA
gctattctggtgttacttt

SEQ ID NO: 912 - RNA, 19 nt, synthetic construct
  source 1..19: mol_type = other RNA
gtgttactttggatcctag

SEQ ID NO: 913 - RNA, 19 nt, synthetic construct
  source 1..19: mol_type = other RNA
ggatcctaggggtatttat

SEQ ID NO: 914 - RNA, 19 nt, synthetic construct
  source 1..19: mol_type = other RNA
ggtatttatggtaccatta

SEQ ID NO: 915 - RNA, 19 nt, synthetic construct
  source 1..19: mol_type = other RNA
gtaccattagcagacgaaa

SEQ ID NO: 916 - RNA, 19 nt, synthetic construct
  source 1..19: mol_type = other RNA
cagacgaaaggagttccca

SEQ ID NO: 917 - RNA, 19 nt, synthetic construct
  source 1..19: mol_type = other RNA
aggagttcccatacaggat

SEQ ID NO: 918 - RNA, 19 nt, synthetic construct
  source 1..19: mol_type = other RNA
catacaggatacccttaga

SEQ ID NO: 919 - RNA, 19 nt, synthetic construct
  source 1..19: mol_type = other RNA
cttagatttggtccccaaa

SEQ ID NO: 920 - RNA, 19 nt, synthetic construct
  source 1..19: mol_type = other RNA
tccccaaaacagaaatcaa

SEQ ID NO: 921 - RNA, 19 nt, synthetic construct
  source 1..19: mol_type = other RNA
acagaaatcaaaaggattt

SEQ ID NO: 922 - RNA, 19 nt, synthetic construct
  source 1..19: mol_type = other RNA
aaaggattttgagtgtaaa

SEQ ID NO: 923 - RNA, 19 nt, synthetic construct
  source 1..19: mol_type = other RNA
agtgtaaaaggactgcttg

SEQ ID NO: 924 - RNA, 19 nt, synthetic construct
  source 1..19: mol_type = other RNA
aaggactgcttgtaggtga

SEQ ID NO: 925 - RNA, 19 nt, synthetic construct
  source 1..19: mol_type = other RNA
gtaggtgagatcttgtctg

SEQ ID NO: 926 - RNA, 19 nt, synthetic construct
  source 1..19: mol_type = other RNA
atcttgtctgcagttctaa

SEQ ID NO: 927 - RNA, 19 nt, synthetic construct
  source 1..19: mol_type = other RNA
gttctaagtcaggaaggca

SEQ ID NO: 928 - RNA, 19 nt, synthetic construct
  source 1..19: mol_type = other RNA
gaaggcatcaatatcctaa

SEQ ID NO: 929 - RNA, 19 nt, synthetic construct
  source 1..19: mol_type = other RNA
tcaatatcctaacccacct

SEQ ID NO: 930 - RNA, 19 nt, synthetic construct
  source 1..19: mol_type = other RNA
ccacctccccaaagggagt

SEQ ID NO: 931 - RNA, 19 nt, synthetic construct
  source 1..19: mol_type = other RNA
ccccaaagggagtgcagag

SEQ ID NO: 932 - RNA, 19 nt, synthetic construct
  source 1..19: mol_type = other RNA
gtgcagaggcggagctgat

SEQ ID NO: 933 - RNA, 19 nt, synthetic construct
  source 1..19: mol_type = other RNA
ggagctgatgagcgttgtc

SEQ ID NO: 934 - RNA, 19 nt, synthetic construct
  source 1..19: mol_type = other RNA
cgttgtcccagtattctat

SEQ ID NO: 935 - RNA, 19 nt, synthetic construct
  source 1..19: mol_type = other RNA
ccagtattctatgtttttc

SEQ ID NO: 936 - RNA, 19 nt, synthetic construct
  source 1..19: mol_type = other RNA
gtttttcactacctggaaa

SEQ ID NO: 937 - RNA, 19 nt, synthetic construct
  source 1..19: mol_type = other RNA
cctggaaacaggaaatcat

SEQ ID NO: 938 - RNA, 19 nt, synthetic construct
  source 1..19: mol_type = other RNA
ggaacatttttcattctga

SEQ ID NO: 939 - RNA, 19 nt, synthetic construct
  source 1..19: mol_type = other RNA
cattctgacccattaattg

SEQ ID NO: 940 - RNA, 19 nt, synthetic construct
  source 1..19: mol_type = other RNA
ccattaattgaaaagcaga

SEQ ID NO: 941 - RNA, 19 nt, synthetic construct
  source 1..19: mol_type = other RNA
aaagcagaaactgaagaaa

SEQ ID NO: 942 - RNA, 19 nt, synthetic construct
  source 1..19: mol_type = other RNA
aactgaagaaaaaattaaa

SEQ ID NO: 943 - RNA, 19 nt, synthetic construct
  source 1..19: mol_type = other RNA
aaaaaattaaaagaaggga

SEQ ID NO: 944 - RNA, 19 nt, synthetic construct
  source 1..19: mol_type = other RNA
agggatgttgagcattatg

SEQ ID NO: 945 - RNA, 19 nt, synthetic construct
  source 1..19: mol_type = other RNA
gagcattatgtcctacaga

SEQ ID NO: 946 - RNA, 19 nt, synthetic construct
  source 1..19: mol_type = other RNA
tgtcctacagaaatgctga

SEQ ID NO: 947 - RNA, 19 nt, synthetic construct
  source 1..19: mol_type = other RNA
aatgctgactactcttaca

SEQ ID NO: 948 - RNA, 19 nt, synthetic construct
  source 1..19: mol_type = other RNA
tactcttacagtgtgtgga

SEQ ID NO: 949 - RNA, 19 nt, synthetic construct
  source 1..19: mol_type = other RNA
agtgtgtggaagggtggaa

SEQ ID NO: 950 - RNA, 19 nt, synthetic construct
  source 1..19: mol_type = other RNA
gggtggaagtgctagcact

SEQ ID NO: 951 - RNA, 19 nt, synthetic construct
  source 1..19: mol_type = other RNA
gctagcacttggttaacag

SEQ ID NO: 952 - RNA, 19 nt, synthetic construct
  source 1..19: mol_type = other RNA
ggttaacagcttttgcttt

SEQ ID NO: 953 - RNA, 19 nt, synthetic construct
  source 1..19: mol_type = other RNA
tgctttaagagtacttgga

SEQ ID NO: 954 - RNA, 19 nt, synthetic construct
  source 1..19: mol_type = other RNA
gtacttggacaagtaaata

SEQ ID NO: 955 - RNA, 19 nt, synthetic construct
  source 1..19: mol_type = other RNA
caagtaaataaatacgtag

SEQ ID NO: 956 - RNA, 19 nt, synthetic construct
  source 1..19: mol_type = other RNA
ataaatacgtagagcagaa

SEQ ID NO: 957 - RNA, 19 nt, synthetic construct
  source 1..19: mol_type = other RNA
gagcagaaccaaaattcaa

SEQ ID NO: 958 - RNA, 19 nt, synthetic construct
  source 1..19: mol_type = other RNA
aattcaatttgtaattctt

SEQ ID NO: 959 - RNA, 19 nt, synthetic construct
  source 1..19: mol_type = other RNA
gtaattctttattgtggct

SEQ ID NO: 960 - RNA, 19 nt, synthetic construct
  source 1..19: mol_type = other RNA
attgtggctagttgagaat

SEQ ID NO: 961 - RNA, 19 nt, synthetic construct
  source 1..19: mol_type = other RNA
ctagttgagaattatcaat

SEQ ID NO: 962 - RNA, 19 nt, synthetic construct
  source 1..19: mol_type = other RNA
ttatcaattagataatgga

SEQ ID NO: 963 - RNA, 19 nt, synthetic construct
  source 1..19: mol_type = other RNA
aatggatctttcaaggaaa

SEQ ID NO: 964 - RNA, 19 nt, synthetic construct
  source 1..19: mol_type = other RNA
ctttcaaggaaaattcaca

SEQ ID NO: 965 - RNA, 19 nt, synthetic construct
  source 1..19: mol_type = other RNA
aattcacagtatcaaccaa

SEQ ID NO: 966 - RNA, 19 nt, synthetic construct
  source 1..19: mol_type = other RNA
gtatcaaccaataaaatta

SEQ ID NO: 967 - RNA, 19 nt, synthetic construct
  source 1..19: mol_type = other RNA
aaaattacagggtaccttg

SEQ ID NO: 968 - RNA, 19 nt, synthetic construct
  source 1..19: mol_type = other RNA
agggtaccttgcctgttga

SEQ ID NO: 969 - RNA, 19 nt, synthetic construct
  source 1..19: mol_type = other RNA
gttgaagcccgagagaaca

SEQ ID NO: 970 - RNA, 19 nt, synthetic construct
  source 1..19: mol_type = other RNA
ccgagagaacagcttatat

SEQ ID NO: 971 - RNA, 19 nt, synthetic construct
  source 1..19: mol_type = other RNA
gcttatatcttacagcctt

SEQ ID NO: 972 - RNA, 19 nt, synthetic construct
  source 1..19: mol_type = other RNA
cttacagcctttactgtga

SEQ ID NO: 973 - RNA, 19 nt, synthetic construct
  source 1..19: mol_type = other RNA
gaattagaaaggctttcga

SEQ ID NO: 974 - RNA, 19 nt, synthetic construct
  source 1..19: mol_type = other RNA
ggctttcgatatatgcccc

SEQ ID NO: 975 - RNA, 19 nt, synthetic construct
  source 1..19: mol_type = other RNA
gatatatgccccctggtga

SEQ ID NO: 976 - RNA, 19 nt, synthetic construct
  source 1..19: mol_type = other RNA
ggtgaaaatcgacacagct

SEQ ID NO: 977 - RNA, 19 nt, synthetic construct
  source 1..19: mol_type = other RNA
cgacacagctctaattaaa

SEQ ID NO: 978 - RNA, 19 nt, synthetic construct
  source 1..19: mol_type = other RNA
gctctaattaaagctgaca

SEQ ID NO: 979 - RNA, 19 nt, synthetic construct
  source 1..19: mol_type = other RNA
ctgacaactttctgcttga

SEQ ID NO: 980 - RNA, 19 nt, synthetic construct
  source 1..19: mol_type = other RNA
ctttctgcttgaaaataca

SEQ ID NO: 981 - RNA, 19 nt, synthetic construct
  source 1..19: mol_type = other RNA
aaaatacactgccagccca

SEQ ID NO: 982 - RNA, 19 nt, synthetic construct
  source 1..19: mol_type = other RNA
agcccagagcacctttaca

SEQ ID NO: 983 - RNA, 19 nt, synthetic construct
  source 1..19: mol_type = other RNA
gcacctttacattggccat

SEQ ID NO: 984 - RNA, 19 nt, synthetic construct
  source 1..19: mol_type = other RNA
acattggccatttctgcgt

SEQ ID NO: 985 - RNA, 19 nt, synthetic construct
  source 1..19: mol_type = other RNA
ctgcgtatgctctttccct

SEQ ID NO: 986 - RNA, 19 nt, synthetic construct
  source 1..19: mol_type = other RNA
ctttccctgggagataaaa

SEQ ID NO: 987 - RNA, 19 nt, synthetic construct
  source 1..19: mol_type = other RNA
gagataaaactcacccaca

SEQ ID NO: 988 - RNA, 19 nt, synthetic construct
  source 1..19: mol_type = other RNA
actcacccacagtttcgtt

SEQ ID NO: 989 - RNA, 19 nt, synthetic construct
  source 1..19: mol_type = other RNA
cagtttcgttcaattgttt

SEQ ID NO: 990 - RNA, 19 nt, synthetic construct
  source 1..19: mol_type = other RNA
caattgtttcagctttgaa

SEQ ID NO: 991 - RNA, 19 nt, synthetic construct
  source 1..19: mol_type = other RNA
ctttgaagagagaagcttt

SEQ ID NO: 992 - RNA, 19 nt, synthetic construct
  source 1..19: mol_type = other RNA
gagagaagctttggttaaa

SEQ ID NO: 993 - RNA, 19 nt, synthetic construct
  source 1..19: mol_type = other RNA
gttaaaggtaatccaccca

SEQ ID NO: 994 - RNA, 19 nt, synthetic construct
  source 1..19: mol_type = other RNA
aatccacccatttatcgtt

SEQ ID NO: 995 - RNA, 19 nt, synthetic construct
  source 1..19: mol_type = other RNA
catttatcgtttttggaaa

SEQ ID NO: 996 - RNA, 19 nt, synthetic construct
  source 1..19: mol_type = other RNA
tttggaaagacaatcttca

SEQ ID NO: 997 - RNA, 19 nt, synthetic construct
  source 1..19: mol_type = other RNA
aatcttcagcataaagaca

SEQ ID NO: 998 - RNA, 19 nt, synthetic construct
  source 1..19: mol_type = other RNA
cataaagacagctctgtac

SEQ ID NO: 999 - RNA, 19 nt, synthetic construct
  source 1..19: mol_type = other RNA
ctctgtacctaacactggt

SEQ ID NO: 1000 - RNA, 19 nt, synthetic construct
  source 1..19: mol_type = other RNA
acactggtacggcacgtat

SEQ ID NO: 1001 - RNA, 19 nt, synthetic construct
  source 1..19: mol_type = other RNA
ggcacgtatggtagaaaca

SEQ ID NO: 1002 - RNA, 19 nt, synthetic construct
  source 1..19: mol_type = other RNA
ggtagaaacaactgcctat

SEQ ID NO: 1003 - RNA, 19 nt, synthetic construct
  source 1..19: mol_type = other RNA
caactgcctatgctttact

SEQ ID NO: 1004 - RNA, 19 nt, synthetic construct
  source 1..19: mol_type = other RNA
ctttactcaccagtctgaa

SEQ ID NO: 1005 - RNA, 19 nt, synthetic construct
  source 1..19: mol_type = other RNA
gtctgaacttgaaagatat

SEQ ID NO: 1006 - RNA, 19 nt, synthetic construct
  source 1..19: mol_type = other RNA
acttgaaagatataaatta

SEQ ID NO: 1007 - RNA, 19 nt, synthetic construct
  source 1..19: mol_type = other RNA
tataaattatgttaaccca

SEQ ID NO: 1008 - RNA, 19 nt, synthetic construct
  source 1..19: mol_type = other RNA
gttaacccagtcatcaaat

SEQ ID NO: 1009 - RNA, 19 nt, synthetic construct
  source 1..19: mol_type = other RNA
tcatcaaatggctatcaga

SEQ ID NO: 1010 - RNA, 19 nt, synthetic construct
  source 1..19: mol_type = other RNA
tatcagaagagcagaggta

SEQ ID NO: 1011 - RNA, 19 nt, synthetic construct
  source 1..19: mol_type = other RNA
agaggtatggaggtggctt

SEQ ID NO: 1012 - RNA, 19 nt, synthetic construct
  source 1..19: mol_type = other RNA
gaggtggcttttattcaac

SEQ ID NO: 1013 - RNA, 19 nt, synthetic construct
  source 1..19: mol_type = other RNA
tattcaacccaggacacaa

SEQ ID NO: 1014 - RNA, 19 nt, synthetic construct
  source 1..19: mol_type = other RNA
aggacacaatcaatgccat

SEQ ID NO: 1015 - RNA, 19 nt, synthetic construct
  source 1..19: mol_type = other RNA
caatcaatgccattgaggg

SEQ ID NO: 1016 - RNA, 19 nt, synthetic construct
  source 1..19: mol_type = other RNA
cattgagggcctgacggaa

SEQ ID NO: 1017 - RNA, 19 nt, synthetic construct
  source 1..19: mol_type = other RNA
acggaatattcactcctgg

SEQ ID NO: 1018 - RNA, 19 nt, synthetic construct
  source 1..19: mol_type = other RNA
ttcactcctggttaaacaa

SEQ ID NO: 1019 - RNA, 19 nt, synthetic construct
  source 1..19: mol_type = other RNA
ggttaaacaactccgcttg

SEQ ID NO: 1020 - RNA, 19 nt, synthetic construct
  source 1..19: mol_type = other RNA
ccgcttgagtatggacatc

SEQ ID NO: 1021 - RNA, 19 nt, synthetic construct
  source 1..19: mol_type = other RNA
ggacatcgatgtttcttac

SEQ ID NO: 1022 - RNA, 19 nt, synthetic construct
  source 1..19: mol_type = other RNA
cgatgtttcttacaagcat

SEQ ID NO: 1023 - RNA, 19 nt, synthetic construct
  source 1..19: mol_type = other RNA
caagcataaaggtgcctta

SEQ ID NO: 1024 - RNA, 19 nt, synthetic construct
  source 1..19: mol_type = other RNA
gtgccttacataattataa

SEQ ID NO: 1025 - RNA, 19 nt, synthetic construct
  source 1..19: mol_type = other RNA
acataattataaaatgaca

SEQ ID NO: 1026 - RNA, 19 nt, synthetic construct
  source 1..19: mol_type = other RNA
aaaatgacagacaagaatt

SEQ ID NO: 1027 - RNA, 19 nt, synthetic construct
  source 1..19: mol_type = other RNA
caagaatttccttgggagg

SEQ ID NO: 1028 - RNA, 19 nt, synthetic construct
  source 1..19: mol_type = other RNA
ccttgggaggccagtagag

SEQ ID NO: 1029 - RNA, 19 nt, synthetic construct
  source 1..19: mol_type = other RNA
agtagaggtgcttctcaat

SEQ ID NO: 1030 - RNA, 19 nt, synthetic construct
  source 1..19: mol_type = other RNA
cttctcaatgatgacctca

SEQ ID NO: 1031 - RNA, 19 nt, synthetic construct
  source 1..19: mol_type = other RNA
tgacctcattgtcagtaca

SEQ ID NO: 1032 - RNA, 19 nt, synthetic construct
  source 1..19: mol_type = other RNA
gtcagtacaggatttggca

SEQ ID NO: 1033 - RNA, 19 nt, synthetic construct
  source 1..19: mol_type = other RNA
aggatttggcagtggcttg

SEQ ID NO: 1034 - RNA, 19 nt, synthetic construct
  source 1..19: mol_type = other RNA
tggcttggctacagtacat

SEQ ID NO: 1035 - RNA, 19 nt, synthetic construct
  source 1..19: mol_type = other RNA
gctacagtacatgtaacaa

SEQ ID NO: 1036 - RNA, 19 nt, synthetic construct
  source 1..19: mol_type = other RNA
aacaactgtagttcacaaa

SEQ ID NO: 1037 - RNA, 19 nt, synthetic construct
  source 1..19: mol_type = other RNA
gtagttcacaaaaccagta

SEQ ID NO: 1038 - RNA, 19 nt, synthetic construct
  source 1..19: mol_type = other RNA
aaaccagtacctctgagga

SEQ ID NO: 1039 - RNA, 19 nt, synthetic construct
  source 1..19: mol_type = other RNA
tgaggaagtttgcagcttt

SEQ ID NO: 1040 - RNA, 19 nt, synthetic construct
  source 1..19: mol_type = other RNA
tgcagcttttatttgaaaa

SEQ ID NO: 1041 - RNA, 19 nt, synthetic construct
  source 1..19: mol_type = other RNA
atttgaaaatcgatactca

SEQ ID NO: 1042 - RNA, 19 nt, synthetic construct
  source 1..19: mol_type = other RNA
cgatactcaggatattgaa

SEQ ID NO: 1043 - RNA, 19 nt, synthetic construct
  source 1..19: mol_type = other RNA
ggatattgaagcatcccac

SEQ ID NO: 1044 - RNA, 19 nt, synthetic construct
  source 1..19: mol_type = other RNA
gaagcatcccactacagag

SEQ ID NO: 1045 - RNA, 19 nt, synthetic construct
  source 1..19: mol_type = other RNA
actacagaggctacggaaa

SEQ ID NO: 1046 - RNA, 19 nt, synthetic construct
  source 1..19: mol_type = other RNA
cggaaactctgattacaaa

SEQ ID NO: 1047 - RNA, 19 nt, synthetic construct
  source 1..19: mol_type = other RNA
tgattacaaacgcatagta

SEQ ID NO: 1048 - RNA, 19 nt, synthetic construct
  source 1..19: mol_type = other RNA
gcatagtagcatgtgccag

SEQ ID NO: 1049 - RNA, 19 nt, synthetic construct
  source 1..19: mol_type = other RNA
gcatgtgccagctacaagc

SEQ ID NO: 1050 - RNA, 19 nt, synthetic construct
  source 1..19: mol_type = other RNA
ctacaagcccagcagggaa

SEQ ID NO: 1051 - RNA, 19 nt, synthetic construct
  source 1..19: mol_type = other RNA
cagcagggaagaatcatca

SEQ ID NO: 1052 - RNA, 19 nt, synthetic construct
  source 1..19: mol_type = other RNA
gaatcatcatctggatcct

SEQ ID NO: 1053 - RNA, 19 nt, synthetic construct
  source 1..19: mol_type = other RNA
gatcctctcatgcggtgat

SEQ ID NO: 1054 - RNA, 19 nt, synthetic construct
  source 1..19: mol_type = other RNA
ctcatgcggtgatggacat

SEQ ID NO: 1055 - RNA, 19 nt, synthetic construct
  source 1..19: mol_type = other RNA
gatggacatctccttgcct

SEQ ID NO: 1056 - RNA, 19 nt, synthetic construct
  source 1..19: mol_type = other RNA
cttgcctactggaatcagt

SEQ ID NO: 1057 - RNA, 19 nt, synthetic construct
  source 1..19: mol_type = other RNA
gaatcagtgcaaatgaaga

SEQ ID NO: 1058 - RNA, 19 nt, synthetic construct
  source 1..19: mol_type = other RNA
aaatgaagaagacttaaaa

SEQ ID NO: 1059 - RNA, 19 nt, synthetic construct
  source 1..19: mol_type = other RNA
gaagacttaaaagcccttg

SEQ ID NO: 1060 - RNA, 19 nt, synthetic construct
  source 1..19: mol_type = other RNA
ccttgtggaaggggtggat

SEQ ID NO: 1061 - RNA, 19 nt, synthetic construct
  source 1..19: mol_type = other RNA
gaaggggtggatcaactat

SEQ ID NO: 1062 - RNA, 19 nt, synthetic construct
  source 1..19: mol_type = other RNA
atcaactattcactgatta

SEQ ID NO: 1063 - RNA, 19 nt, synthetic construct
  source 1..19: mol_type = other RNA
cactgattaccaaatcaaa

SEQ ID NO: 1064 - RNA, 19 nt, synthetic construct
  source 1..19: mol_type = other RNA
atcaaagatggacatgtta

SEQ ID NO: 1065 - RNA, 19 nt, synthetic construct
  source 1..19: mol_type = other RNA
ggacatgttattctgcaac

SEQ ID NO: 1066 - RNA, 19 nt, synthetic construct
  source 1..19: mol_type = other RNA
tctgcaactgaattcgatt

SEQ ID NO: 1067 - RNA, 19 nt, synthetic construct
  source 1..19: mol_type = other RNA
gaattcgattccctccagt

SEQ ID NO: 1068 - RNA, 19 nt, synthetic construct
  source 1..19: mol_type = other RNA
ccctccagtgatttccttt

SEQ ID NO: 1069 - RNA, 19 nt, synthetic construct
  source 1..19: mol_type = other RNA
gatttcctttgtgtacgat

SEQ ID NO: 1070 - RNA, 19 nt, synthetic construct
  source 1..19: mol_type = other RNA
gtacgattccggatatttg

SEQ ID NO: 1071 - RNA, 19 nt, synthetic construct
  source 1..19: mol_type = other RNA
cggatatttgaactctttg

SEQ ID NO: 1072 - RNA, 19 nt, synthetic construct
  source 1..19: mol_type = other RNA
actctttgaagttgggttt

SEQ ID NO: 1073 - RNA, 19 nt, synthetic construct
  source 1..19: mol_type = other RNA
agttgggtttctcagtcct

SEQ ID NO: 1074 - RNA, 19 nt, synthetic construct
  source 1..19: mol_type = other RNA
ttctcagtcctgccacttt

SEQ ID NO: 1075 - RNA, 19 nt, synthetic construct
  source 1..19: mol_type = other RNA
cactttcacagtgtacgaa

SEQ ID NO: 1076 - RNA, 19 nt, synthetic construct
  source 1..19: mol_type = other RNA
cacagtgtacgaataccac

SEQ ID NO: 1077 - RNA, 19 nt, synthetic construct
  source 1..19: mol_type = other RNA
accacagaccagataaaca

SEQ ID NO: 1078 - RNA, 19 nt, synthetic construct
  source 1..19: mol_type = other RNA
ccagataaacagtgtacca

SEQ ID NO: 1079 - RNA, 19 nt, synthetic construct
  source 1..19: mol_type = other RNA
cagtgtaccatgttttata

SEQ ID NO: 1080 - RNA, 19 nt, synthetic construct
  source 1..19: mol_type = other RNA
gttttatagcacttccaat

SEQ ID NO: 1081 - RNA, 19 nt, synthetic construct
  source 1..19: mol_type = other RNA
cttccaatatcaaaattca

SEQ ID NO: 1082 - RNA, 19 nt, synthetic construct
  source 1..19: mol_type = other RNA
atcaaaattcagaaagtct

SEQ ID NO: 1083 - RNA, 19 nt, synthetic construct
  source 1..19: mol_type = other RNA
gaaagtctgtgaaggagcc

SEQ ID NO: 1084 - RNA, 19 nt, synthetic construct
  source 1..19: mol_type = other RNA
gaaggagccgcgtgcaagt

SEQ ID NO: 1085 - RNA, 19 nt, synthetic construct
  source 1..19: mol_type = other RNA
cgtgcaagtgtgtagaagc

SEQ ID NO: 1086 - RNA, 19 nt, synthetic construct
  source 1..19: mol_type = other RNA
gtagaagctgattgtgggc

SEQ ID NO: 1087 - RNA, 19 nt, synthetic construct
  source 1..19: mol_type = other RNA
ctgattgtgggcaaatgca

SEQ ID NO: 1088 - RNA, 19 nt, synthetic construct
  source 1..19: mol_type = other RNA
gcaaatgcaggaagaattg

SEQ ID NO: 1089 - RNA, 19 nt, synthetic construct
  source 1..19: mol_type = other RNA
gaagaattggatctgacaa

SEQ ID NO: 1090 - RNA, 19 nt, synthetic construct
  source 1..19: mol_type = other RNA
ctgacaatctctgcagaga

SEQ ID NO: 1091 - RNA, 19 nt, synthetic construct
  source 1..19: mol_type = other RNA
gcagagacaagaaaacaaa

SEQ ID NO: 1092 - RNA, 19 nt, synthetic construct
  source 1..19: mol_type = other RNA
caagaaaacaaacagcatg

SEQ ID NO: 1093 - RNA, 19 nt, synthetic construct
  source 1..19: mol_type = other RNA
acagcatgtaaaccagaga

SEQ ID NO: 1094 - RNA, 19 nt, synthetic construct
  source 1..19: mol_type = other RNA
ccagagattgcatatgctt

SEQ ID NO: 1095 - RNA, 19 nt, synthetic construct
  source 1..19: mol_type = other RNA
gcatatgcttataaagtta

SEQ ID NO: 1096 - RNA, 19 nt, synthetic construct
  source 1..19: mol_type = other RNA
ttataaagttagcatcaca

SEQ ID NO: 1097 - RNA, 19 nt, synthetic construct
  source 1..19: mol_type = other RNA
catcacatccatcactgta

SEQ ID NO: 1098 - RNA, 19 nt, synthetic construct
  source 1..19: mol_type = other RNA
tcactgtagaaaatgtttt

SEQ ID NO: 1099 - RNA, 19 nt, synthetic construct
  source 1..19: mol_type = other RNA
agaaaatgtttttgtcaag

SEQ ID NO: 1100 - RNA, 19 nt, synthetic construct
  source 1..19: mol_type = other RNA
tttgtcaagtacaaggcaa

SEQ ID NO: 1101 - RNA, 19 nt, synthetic construct
  source 1..19: mol_type = other RNA
aggcaacccttctggatat

SEQ ID NO: 1102 - RNA, 19 nt, synthetic construct
  source 1..19: mol_type = other RNA
ccttctggatatctacaaa

SEQ ID NO: 1103 - RNA, 19 nt, synthetic construct
  source 1..19: mol_type = other RNA
tatctacaaaactggggaa

SEQ ID NO: 1104 - RNA, 19 nt, synthetic construct
  source 1..19: mol_type = other RNA
ctggggaagctgttgctga

SEQ ID NO: 1105 - RNA, 19 nt, synthetic construct
  source 1..19: mol_type = other RNA
ctgttgctgagaaagactc

SEQ ID NO: 1106 - RNA, 19 nt, synthetic construct
  source 1..19: mol_type = other RNA
gactctgagattaccttca

SEQ ID NO: 1107 - RNA, 19 nt, synthetic construct
  source 1..19: mol_type = other RNA
gagattaccttcattaaaa

SEQ ID NO: 1108 - RNA, 19 nt, synthetic construct
  source 1..19: mol_type = other RNA
attaaaaaggtaacctgta

SEQ ID NO: 1109 - RNA, 19 nt, synthetic construct
  source 1..19: mol_type = other RNA
taacctgtactaacgctga

SEQ ID NO: 1110 - RNA, 19 nt, synthetic construct
  source 1..19: mol_type = other RNA
ctaacgctgagctggtaaa

SEQ ID NO: 1111 - RNA, 19 nt, synthetic construct
  source 1..19: mol_type = other RNA
ggtaaaaggaagacagtac

SEQ ID NO: 1112 - RNA, 19 nt, synthetic construct
  source 1..19: mol_type = other RNA
gaagacagtacttaattat

SEQ ID NO: 1113 - RNA, 19 nt, synthetic construct
  source 1..19: mol_type = other RNA
cttaattatgggtaaagaa

SEQ ID NO: 1114 - RNA, 19 nt, synthetic construct
  source 1..19: mol_type = other RNA
taaagaagccctccagata

SEQ ID NO: 1115 - RNA, 19 nt, synthetic construct
  source 1..19: mol_type = other RNA
cctccagataaaatacaat

SEQ ID NO: 1116 - RNA, 19 nt, synthetic construct
  source 1..19: mol_type = other RNA
aaatacaatttcagtttca

SEQ ID NO: 1117 - RNA, 19 nt, synthetic construct
  source 1..19: mol_type = other RNA
cagtttcaggtacatctac

SEQ ID NO: 1118 - RNA, 19 nt, synthetic construct
  source 1..19: mol_type = other RNA
ggtacatctaccctttaga

SEQ ID NO: 1119 - RNA, 19 nt, synthetic construct
  source 1..19: mol_type = other RNA
cctttagattccttgacct

SEQ ID NO: 1120 - RNA, 19 nt, synthetic construct
  source 1..19: mol_type = other RNA
ccttgacctggattgaata

SEQ ID NO: 1121 - RNA, 19 nt, synthetic construct
  source 1..19: mol_type = other RNA
ggattgaatactggcctag

SEQ ID NO: 1122 - RNA, 19 nt, synthetic construct
  source 1..19: mol_type = other RNA
ctggcctagagacacaaca

SEQ ID NO: 1123 - RNA, 19 nt, synthetic construct
  source 1..19: mol_type = other RNA
gagacacaacatgttcatc

SEQ ID NO: 1124 - RNA, 19 nt, synthetic construct
  source 1..19: mol_type = other RNA
gttcatcgtgtcaagcatt

SEQ ID NO: 1125 - RNA, 19 nt, synthetic construct
  source 1..19: mol_type = other RNA
gtcaagcatttttagctaa

SEQ ID NO: 1126 - RNA, 19 nt, synthetic construct
  source 1..19: mol_type = other RNA
agctaatttagatgaattt

SEQ ID NO: 1127 - RNA, 19 nt, synthetic construct
  source 1..19: mol_type = other RNA
agatgaatttgccgaagat

SEQ ID NO: 1128 - RNA, 19 nt, synthetic construct
  source 1..19: mol_type = other RNA
ccgaagatatctttttaaa

SEQ ID NO: 1129 - RNA, 19 nt, synthetic construct
  source 1..19: mol_type = other RNA
ctttttaaatggatgctaa

SEQ ID NO: 1130 - RNA, 19 nt, synthetic construct
  source 1..19: mol_type = other RNA
ggatgctaaaattcctgaa

SEQ ID NO: 1131 - RNA, 19 nt, synthetic construct
  source 1..19: mol_type = other RNA
taaaattcctgaagttcag

SEQ ID NO: 1132 - RNA, 19 nt, synthetic construct
  source 1..19: mol_type = other RNA
agttcagctgcatacagtt

SEQ ID NO: 1133 - RNA, 19 nt, synthetic construct
  source 1..19: mol_type = other RNA
gcatacagtttgcacttat

SEQ ID NO: 1134 - RNA, 19 nt, synthetic construct
  source 1..19: mol_type = other RNA
acttatggactcctgttgt

SEQ ID NO: 1135 - RNA, 19 nt, synthetic construct
  source 1..19: mol_type = other RNA
ggactcctgttgttgaagt

SEQ ID NO: 1136 - RNA, 19 nt, synthetic construct
  source 1..19: mol_type = other RNA
tgttgaagttcgttttttt

SEQ ID NO: 1137 - RNA, 19 nt, synthetic construct
  source 1..19: mol_type = other RNA
ttttttgttttcttctttt

SEQ ID NO: 1138 - RNA, 19 nt, synthetic construct
  source 1..19: mol_type = other RNA
tcttctttttttaaacatt

SEQ ID NO: 1139 - RNA, 19 nt, synthetic construct
  source 1..19: mol_type = other RNA
tttttaaacattcatagct

SEQ ID NO: 1140 - RNA, 19 nt, synthetic construct
  source 1..19: mol_type = other RNA
atagctggtcttatttgta

SEQ ID NO: 1141 - RNA, 19 nt, synthetic construct
  source 1..19: mol_type = other RNA
gtcttatttgtaaagctca

SEQ ID NO: 1142 - RNA, 19 nt, synthetic construct
  source 1..19: mol_type = other RNA
aaagctcactttacttaga

SEQ ID NO: 1143 - RNA, 19 nt, synthetic construct
  source 1..19: mol_type = other RNA
acttagaattagtggcact

SEQ ID NO: 1144 - RNA, 19 nt, synthetic construct
  source 1..19: mol_type = other RNA
agtggcacttgcttttatt

SEQ ID NO: 1145 - RNA, 19 nt, synthetic construct
  source 1..19: mol_type = other RNA
gcttttattagagaatgat

SEQ ID NO: 1146 - RNA, 19 nt, synthetic construct
  source 1..19: mol_type = other RNA
gagaatgatttcaaatgct

SEQ ID NO: 1147 - RNA, 19 nt, synthetic construct
  source 1..19: mol_type = other RNA
tttcaaatgctgtaacttt

SEQ ID NO: 1148 - RNA, 19 nt, synthetic construct
  source 1..19: mol_type = other RNA
gtaactttctgaaataaca

SEQ ID NO: 1149 - RNA, 19 nt, synthetic construct
  source 1..19: mol_type = other RNA
gaaataacatggccttgga

SEQ ID NO: 1150 - RNA, 19 nt, synthetic construct
  source 1..19: mol_type = other RNA
ccttggagggcatgaagac

SEQ ID NO: 1151 - RNA, 19 nt, synthetic construct
  source 1..19: mol_type = other RNA
agggcatgaagacagatac

SEQ ID NO: 1152 - RNA, 19 nt, synthetic construct
  source 1..19: mol_type = other RNA
gatactcctccaaggttat

SEQ ID NO: 1153 - RNA, 19 nt, synthetic construct
  source 1..19: mol_type = other RNA
cctccaaggttattggaca

SEQ ID NO: 1154 - RNA, 19 nt, synthetic construct
  source 1..19: mol_type = other RNA
ggacaccggaaacaataaa

SEQ ID NO: 1155 - RNA, 19 nt, synthetic construct
  source 1..19: mol_type = other RNA
gaaacaataaattggaaca

SEQ ID NO: 1156 - RNA, 19 nt, synthetic construct
  source 1..19: mol_type = other RNA
attggaacacctcctcaaa

SEQ ID NO: 1157 - RNA, 19 nt, synthetic construct
  source 1..19: mol_type = other RNA
tcctcaaacctaccactca

SEQ ID NO: 1158 - RNA, 19 nt, synthetic construct
  source 1..19: mol_type = other RNA
ctaccactcaggaatgttt

SEQ ID NO: 1159 - RNA, 19 nt, synthetic construct
  source 1..19: mol_type = other RNA
aatgtttgctggggccgaa

SEQ ID NO: 1160 - RNA, 19 nt, synthetic construct
  source 1..19: mol_type = other RNA
tgctggggccgaaagaaca

SEQ ID NO: 1161 - RNA, 19 nt, synthetic construct
  source 1..19: mol_type = other RNA
aaagaacagtccattgaaa

SEQ ID NO: 1162 - RNA, 19 nt, synthetic construct
  source 1..19: mol_type = other RNA
cattgaaagggagtattac

SEQ ID NO: 1163 - RNA, 19 nt, synthetic construct
  source 1..19: mol_type = other RNA
ggagtattacaaaaacatg

SEQ ID NO: 1164 - RNA, 19 nt, synthetic construct
  source 1..19: mol_type = other RNA
aaaacatggcctttgcttg

SEQ ID NO: 1165 - RNA, 19 nt, synthetic construct
  source 1..19: mol_type = other RNA
gcctttgcttgaaagaaaa

SEQ ID NO: 1166 - RNA, 19 nt, synthetic construct
  source 1..19: mol_type = other RNA
gaaagaaaataccaaggaa

SEQ ID NO: 1167 - RNA, 19 nt, synthetic construct
  source 1..19: mol_type = other RNA
ccaaggaacaggaaactga

SEQ ID NO: 1168 - RNA, 19 nt, synthetic construct
  source 1..19: mol_type = other RNA
aactgatcattaaagcctg

SEQ ID NO: 1169 - RNA, 19 nt, synthetic construct
  source 1..19: mol_type = other RNA
attaaagcctgagtttgct

SEQ ID NO: 1170 - RNA, 19 nt, synthetic construct
  source 1..19: mol_type = other RNA
tagcaggaaaccacggata

SEQ ID NO: 1171 - RNA, 19 nt, synthetic construct
  source 1..19: mol_type = other RNA
ttggaggtagcaggaaacc

SEQ ID NO: 1172 - RNA, 19 nt, synthetic construct
  source 1..19: mol_type = other RNA
aaaggcccatggttggagg

SEQ ID NO: 1173 - RNA, 19 nt, synthetic construct
  source 1..19: mol_type = other RNA
aagtattcccaaaaggccc

SEQ ID NO: 1174 - RNA, 19 nt, synthetic construct
  source 1..19: mol_type = other RNA
ttaaaaaacaaagtattcc

SEQ ID NO: 1175 - RNA, 19 nt, synthetic construct
  source 1..19: mol_type = other RNA
ggaagattaaaaaacaaag

SEQ ID NO: 1176 - RNA, 19 nt, synthetic construct
  source 1..19: mol_type = other RNA
ccaggttttccccaggaag

SEQ ID NO: 1177 - RNA, 19 nt, synthetic construct
  source 1..19: mol_type = other RNA
tcctgtccccaggttttcc

SEQ ID NO: 1178 - RNA, 19 nt, synthetic construct
  source 1..19: mol_type = other RNA
atatgtttgctcctgtccc

SEQ ID NO: 1179 - RNA, 19 nt, synthetic construct
  source 1..19: mol_type = other RNA
ctgaaatgacatatgtttg

SEQ ID NO: 1180 - RNA, 19 nt, synthetic construct
  source 1..19: mol_type = other RNA
tatttttggtgctgaaatg

SEQ ID NO: 1181 - RNA, 19 nt, synthetic construct
  source 1..19: mol_type = other RNA
cacggaatatttttggtgc

SEQ ID NO: 1182 - RNA, 19 nt, synthetic construct
  source 1..19: mol_type = other RNA
ttcagatgctccaacacgg

SEQ ID NO: 1183 - RNA, 19 nt, synthetic construct
  source 1..19: mol_type = other RNA
caatattttcagatgctcc

SEQ ID NO: 1184 - RNA, 19 nt, synthetic construct
  source 1..19: mol_type = other RNA
cttgaatcacaatattttc

SEQ ID NO: 1185 - RNA, 19 nt, synthetic construct
  source 1..19: mol_type = other RNA
gtatccataaacttgaatc

SEQ ID NO: 1186 - RNA, 19 nt, synthetic construct
  source 1..19: mol_type = other RNA
caaatgcttcagtgtatcc

SEQ ID NO: 1187 - RNA, 19 nt, synthetic construct
  source 1..19: mol_type = other RNA
ttgttgcatcaaatgcttc

SEQ ID NO: 1188 - RNA, 19 nt, synthetic construct
  source 1..19: mol_type = other RNA
tttaatagagattgttgca

SEQ ID NO: 1189 - RNA, 19 nt, synthetic construct
  source 1..19: mol_type = other RNA
ataacttttaatagagatt

SEQ ID NO: 1190 - RNA, 19 nt, synthetic construct
  source 1..19: mol_type = other RNA
ttttttatcaggataactt

SEQ ID NO: 1191 - RNA, 19 nt, synthetic construct
  source 1..19: mol_type = other RNA
taactaaattttttatcag

SEQ ID NO: 1192 - RNA, 19 nt, synthetic construct
  source 1..19: mol_type = other RNA
tggcctgaggagtaactaa

SEQ ID NO: 1193 - RNA, 19 nt, synthetic construct
  source 1..19: mol_type = other RNA
aaatgaacatggcctgagg

SEQ ID NO: 1194 - RNA, 19 nt, synthetic construct
  source 1..19: mol_type = other RNA
ttctctgaggataaatgaa

SEQ ID NO: 1195 - RNA, 19 nt, synthetic construct
  source 1..19: mol_type = other RNA
ttggaatttattctctgag

SEQ ID NO: 1196 - RNA, 19 nt, synthetic construct
  source 1..19: mol_type = other RNA
cagagttttggaatttatt

SEQ ID NO: 1197 - RNA, 19 nt, synthetic construct
  source 1..19: mol_type = other RNA
tattgttaagattgcagag

SEQ ID NO: 1198 - RNA, 19 nt, synthetic construct
  source 1..19: mol_type = other RNA
ttttggttgtattgttaag

SEQ ID NO: 1199 - RNA, 19 nt, synthetic construct
  source 1..19: mol_type = other RNA
caggcaattgttttggttg

SEQ ID NO: 1200 - RNA, 19 nt, synthetic construct
  source 1..19: mol_type = other RNA
tttgtcctccaggcaattg

SEQ ID NO: 1201 - RNA, 19 nt, synthetic construct
  source 1..19: mol_type = other RNA
aagaaactgggttttgtcc

SEQ ID NO: 1202 - RNA, 19 nt, synthetic construct
  source 1..19: mol_type = other RNA
aatacacataagaaactgg

SEQ ID NO: 1203 - RNA, 19 nt, synthetic construct
  source 1..19: mol_type = other RNA
acaacttccaaatacacat

SEQ ID NO: 1204 - RNA, 19 nt, synthetic construct
  source 1..19: mol_type = other RNA
atgctttgatacaacttcc

SEQ ID NO: 1205 - RNA, 19 nt, synthetic construct
  source 1..19: mol_type = other RNA
ttgaaaaatgctttgatac

SEQ ID NO: 1206 - RNA, 19 nt, synthetic construct
  source 1..19: mol_type = other RNA
ttctttttgattttgaaaa

SEQ ID NO: 1207 - RNA, 19 nt, synthetic construct
  source 1..19: mol_type = other RNA
gttattggcattctttttg

SEQ ID NO: 1208 - RNA, 19 nt, synthetic construct
  source 1..19: mol_type = other RNA
attgtcataggttattggc

SEQ ID NO: 1209 - RNA, 19 nt, synthetic construct
  source 1..19: mol_type = other RNA
agaaatccattgtcatagg

SEQ ID NO: 1210 - RNA, 19 nt, synthetic construct
  source 1..19: mol_type = other RNA
atgaatgaagagaaatcca

SEQ ID NO: 1211 - RNA, 19 nt, synthetic construct
  source 1..19: mol_type = other RNA
aggtttgtctgtatgaatg

SEQ ID NO: 1212 - RNA, 19 nt, synthetic construct
  source 1..19: mol_type = other RNA
gtataaacaggtttgtctg

SEQ ID NO: 1213 - RNA, 19 nt, synthetic construct
  source 1..19: mol_type = other RNA
actggtctggagtataaac

SEQ ID NO: 1214 - RNA, 19 nt, synthetic construct
  source 1..19: mol_type = other RNA
aacttttactgactggtct

SEQ ID NO: 1215 - RNA, 19 nt, synthetic construct
  source 1..19: mol_type = other RNA
ataaactctaacttttact

SEQ ID NO: 1216 - RNA, 19 nt, synthetic construct
  source 1..19: mol_type = other RNA
cattcaacgaataaactct

SEQ ID NO: 1217 - RNA, 19 nt, synthetic construct
  source 1..19: mol_type = other RNA
ttcaagtcgtcattcaacg

SEQ ID NO: 1218 - RNA, 19 nt, synthetic construct
  source 1..19: mol_type = other RNA
tcttttggctggcttcaag

SEQ ID NO: 1219 - RNA, 19 nt, synthetic construct
  source 1..19: mol_type = other RNA
cagtttctcttttggctgg

SEQ ID NO: 1220 - RNA, 19 nt, synthetic construct
  source 1..19: mol_type = other RNA
atgaaagttaagacagttt

SEQ ID NO: 1221 - RNA, 19 nt, synthetic construct
  source 1..19: mol_type = other RNA
ttcaggatctatgaaagtt

SEQ ID NO: 1222 - RNA, 19 nt, synthetic construct
  source 1..19: mol_type = other RNA
tgatccttcaggatctatg

SEQ ID NO: 1223 - RNA, 19 nt, synthetic construct
  source 1..19: mol_type = other RNA
tgtcaacttctgatccttc

SEQ ID NO: 1224 - RNA, 19 nt, synthetic construct
  source 1..19: mol_type = other RNA
aatttcttctaccatgtca

SEQ ID NO: 1225 - RNA, 19 nt, synthetic construct
  source 1..19: mol_type = other RNA
caatatgatcaatttcttc

SEQ ID NO: 1226 - RNA, 19 nt, synthetic construct
  source 1..19: mol_type = other RNA
agataattccaatatgatc

SEQ ID NO: 1227 - RNA, 19 nt, synthetic construct
  source 1..19: mol_type = other RNA
caggaaaagagataattcc

SEQ ID NO: 1228 - RNA, 19 nt, synthetic construct
  source 1..19: mol_type = other RNA
cttgaagtcaggaaaagag

SEQ ID NO: 1229 - RNA, 19 nt, synthetic construct
  source 1..19: mol_type = other RNA
ttagacggaatcttgaagt

SEQ ID NO: 1230 - RNA, 19 nt, synthetic construct
  source 1..19: mol_type = other RNA
catatctaggattagacgg

SEQ ID NO: 1231 - RNA, 19 nt, synthetic construct
  source 1..19: mol_type = other RNA
tccacataccatatctagg

SEQ ID NO: 1232 - RNA, 19 nt, synthetic construct
  source 1..19: mol_type = other RNA
ttagccttgatcgtccaca

SEQ ID NO: 1233 - RNA, 19 nt, synthetic construct
  source 1..19: mol_type = other RNA
ttatatttagccttgatcg

SEQ ID NO: 1234 - RNA, 19 nt, synthetic construct
  source 1..19: mol_type = other RNA
tgaaaagtcctctttatat

SEQ ID NO: 1235 - RNA, 19 nt, synthetic construct
  source 1..19: mol_type = other RNA
cagttgttgaaaagtcctc

SEQ ID NO: 1236 - RNA, 19 nt, synthetic construct
  source 1..19: mol_type = other RNA
aaatatgcggttccagttg

SEQ ID NO: 1237 - RNA, 19 nt, synthetic construct
  source 1..19: mol_type = other RNA
tttaacttcaaaatatgcg

SEQ ID NO: 1238 - RNA, 19 nt, synthetic construct
  source 1..19: mol_type = other RNA
aagacatattctttaactt

SEQ ID NO: 1239 - RNA, 19 nt, synthetic construct
  source 1..19: mol_type = other RNA
aatgtggcaagacatattc

SEQ ID NO: 1240 - RNA, 19 nt, synthetic construct
  source 1..19: mol_type = other RNA
ttgagacagaaaaatgtgg

SEQ ID NO: 1241 - RNA, 19 nt, synthetic construct
  source 1..19: mol_type = other RNA
tctggctcgattgagacag

SEQ ID NO: 1242 - RNA, 19 nt, synthetic construct
  source 1..19: mol_type = other RNA
ttatattctggctcgattg

SEQ ID NO: 1243 - RNA, 19 nt, synthetic construct
  source 1..19: mol_type = other RNA
aaccaatgaaattatattc

SEQ ID NO: 1244 - RNA, 19 nt, synthetic construct
  source 1..19: mol_type = other RNA
taaagttcttgtaaccaat

SEQ ID NO: 1245 - RNA, 19 nt, synthetic construct
  source 1..19: mol_type = other RNA
tcaaaattcttaaagttct

SEQ ID NO: 1246 - RNA, 19 nt, synthetic construct
  source 1..19: mol_type = other RNA
tatagtaatttcaaaattc

SEQ ID NO: 1247 - RNA, 19 nt, synthetic construct
  source 1..19: mol_type = other RNA
ttgcttttatagtaatttc

SEQ ID NO: 1248 - RNA, 19 nt, synthetic construct
  source 1..19: mol_type = other RNA
tataaaaatatcttgcttt

SEQ ID NO: 1249 - RNA, 19 nt, synthetic construct
  source 1..19: mol_type = other RNA
tactttattataaaaatat

SEQ ID NO: 1250 - RNA, 19 nt, synthetic construct
  source 1..19: mol_type = other RNA
tcagcctcagtgactactt

SEQ ID NO: 1251 - RNA, 19 nt, synthetic construct
  source 1..19: mol_type = other RNA
ataaacgtcagcctcagtg

SEQ ID NO: 1252 - RNA, 19 nt, synthetic construct
  source 1..19: mol_type = other RNA
tccaaatgtgatataaacg

SEQ ID NO: 1253 - RNA, 19 nt, synthetic construct
  source 1..19: mol_type = other RNA
ttctcttattccaaatgtg

SEQ ID NO: 1254 - RNA, 19 nt, synthetic construct
  source 1..19: mol_type = other RNA
ttttaagtcttctcttatt

SEQ ID NO: 1255 - RNA, 19 nt, synthetic construct
  source 1..19: mol_type = other RNA
tttttgatcatcttttaag

SEQ ID NO: 1256 - RNA, 19 nt, synthetic construct
  source 1..19: mol_type = other RNA
tcatttctttttgatcatc

SEQ ID NO: 1257 - RNA, 19 nt, synthetic construct
  source 1..19: mol_type = other RNA
attgctgtttgcatcattt

SEQ ID NO: 1258 - RNA, 19 nt, synthetic construct
  source 1..19: mol_type = other RNA
ttgtgttttgcattgctgt

SEQ ID NO: 1259 - RNA, 19 nt, synthetic construct
  source 1..19: mol_type = other RNA
tttatcaacattgtgtttt

SEQ ID NO: 1260 - RNA, 19 nt, synthetic construct
  source 1..19: mol_type = other RNA
attccatttatcaacattg

SEQ ID NO: 1261 - RNA, 19 nt, synthetic construct
  source 1..19: mol_type = other RNA
atgtgacttgagcaattcc

SEQ ID NO: 1262 - RNA, 19 nt, synthetic construct
  source 1..19: mol_type = other RNA
aatcaaatgtgacttgagc

SEQ ID NO: 1263 - RNA, 19 nt, synthetic construct
  source 1..19: mol_type = other RNA
tgctgtttcagaatcaaat

SEQ ID NO: 1264 - RNA, 19 nt, synthetic construct
  source 1..19: mol_type = other RNA
ttctttgactgctgtttca

SEQ ID NO: 1265 - RNA, 19 nt, synthetic construct
  source 1..19: mol_type = other RNA
gtagtatgacagttctttg

SEQ ID NO: 1266 - RNA, 19 nt, synthetic construct
  source 1..19: mol_type = other RNA
tcttctaaactgtagtatg

SEQ ID NO: 1267 - RNA, 19 nt, synthetic construct
  source 1..19: mol_type = other RNA
gtttaaatcttctaaactg

SEQ ID NO: 1268 - RNA, 19 nt, synthetic construct
  source 1..19: mol_type = other RNA
taaaggtacttgttgttta

SEQ ID NO: 1269 - RNA, 19 nt, synthetic construct
  source 1..19: mol_type = other RNA
agcaatataaaggtacttg

SEQ ID NO: 1270 - RNA, 19 nt, synthetic construct
  source 1..19: mol_type = other RNA
tatgactgttacagcaata

SEQ ID NO: 1271 - RNA, 19 nt, synthetic construct
  source 1..19: mol_type = other RNA
tgtagactctatgactgtt

SEQ ID NO: 1272 - RNA, 19 nt, synthetic construct
  source 1..19: mol_type = other RNA
aaatccacctgtagactct

SEQ ID NO: 1273 - RNA, 19 nt, synthetic construct
  source 1..19: mol_type = other RNA
ctgcctcttcagaaaatcc

SEQ ID NO: 1274 - RNA, 19 nt, synthetic construct
  source 1..19: mol_type = other RNA
caggtatttctgcctcttc

SEQ ID NO: 1275 - RNA, 19 nt, synthetic construct
  source 1..19: mol_type = other RNA
tttgatgccaggtatttct

SEQ ID NO: 1276 - RNA, 19 nt, synthetic construct
  source 1..19: mol_type = other RNA
gagaggacatatttgatgc

SEQ ID NO: 1277 - RNA, 19 nt, synthetic construct
  source 1..19: mol_type = other RNA
tttgtagggagagaggaca

SEQ ID NO: 1278 - RNA, 19 nt, synthetic construct
  source 1..19: mol_type = other RNA
aggagtagcaaccaaattc

SEQ ID NO: 1279 - RNA, 19 nt, synthetic construct
  source 1..19: mol_type = other RNA
tcaggaaaagaggagtagc

SEQ ID NO: 1280 - RNA, 19 nt, synthetic construct
  source 1..19: mol_type = other RNA
ccaggcttcaggaaaagag

SEQ ID NO: 1281 - RNA, 19 nt, synthetic construct
  source 1..19: mol_type = other RNA
tgggatatggaatcccagg

SEQ ID NO: 1282 - RNA, 19 nt, synthetic construct
  source 1..19: mol_type = other RNA
tgcaccttgatgggatatg

SEQ ID NO: 1283 - RNA, 19 nt, synthetic construct
  source 1..19: mol_type = other RNA
ttaacctgcaccttgatgg

SEQ ID NO: 1284 - RNA, 19 nt, synthetic construct
  source 1..19: mol_type = other RNA
caagcgaatctttaacctg

SEQ ID NO: 1285 - RNA, 19 nt, synthetic construct
  source 1..19: mol_type = other RNA
taccaactggtcaagcgaa

SEQ ID NO: 1286 - RNA, 19 nt, synthetic construct
  source 1..19: mol_type = other RNA
gactcctcctaccaactgg

SEQ ID NO: 1287 - RNA, 19 nt, synthetic construct
  source 1..19: mol_type = other RNA
gtgttactgggactcctcc

SEQ ID NO: 1288 - RNA, 19 nt, synthetic construct
  source 1..19: mol_type = other RNA
tgtgcattcagtgttactg

SEQ ID NO: 1289 - RNA, 19 nt, synthetic construct
  source 1..19: mol_type = other RNA
atcaattgtttgtgcattc

SEQ ID NO: 1290 - RNA, 19 nt, synthetic construct
  source 1..19: mol_type = other RNA
ttggtttacatcaattgtt

SEQ ID NO: 1291 - RNA, 19 nt, synthetic construct
  source 1..19: mol_type = other RNA
tcagatgtctcttggttta

SEQ ID NO: 1292 - RNA, 19 nt, synthetic construct
  source 1..19: mol_type = other RNA
cttggatccaagtcagatg

SEQ ID NO: 1293 - RNA, 19 nt, synthetic construct
  source 1..19: mol_type = other RNA
ttacacttttgcttggatc

SEQ ID NO: 1294 - RNA, 19 nt, synthetic construct
  source 1..19: mol_type = other RNA
aacacgtgttacacttttg

SEQ ID NO: 1295 - RNA, 19 nt, synthetic construct
  source 1..19: mol_type = other RNA
tccatcatcaacacgtgtt

SEQ ID NO: 1296 - RNA, 19 nt, synthetic construct
  source 1..19: mol_type = other RNA
aaaggaagctactccatca

SEQ ID NO: 1297 - RNA, 19 nt, synthetic construct
  source 1..19: mol_type = other RNA
taagcacaaaggaagctac

SEQ ID NO: 1298 - RNA, 19 nt, synthetic construct
  source 1..19: mol_type = other RNA
tccagatgggagattaagc

SEQ ID NO: 1299 - RNA, 19 nt, synthetic construct
  source 1..19: mol_type = other RNA
gcaccgtcactccagatgg

SEQ ID NO: 1300 - RNA, 19 nt, synthetic construct
  source 1..19: mol_type = other RNA
ttaaactccagcaccgtca

SEQ ID NO: 1301 - RNA, 19 nt, synthetic construct
  source 1..19: mol_type = other RNA
tttgacattaaactccagc

SEQ ID NO: 1302 - RNA, 19 nt, synthetic construct
  source 1..19: mol_type = other RNA
tggagcatcagttttgaca

SEQ ID NO: 1303 - RNA, 19 nt, synthetic construct
  source 1..19: mol_type = other RNA
ctggaagatctggagcatc

SEQ ID NO: 1304 - RNA, 19 nt, synthetic construct
  source 1..19: mol_type = other RNA
ttttcttctggaagatctg

SEQ ID NO: 1305 - RNA, 19 nt, synthetic construct
  source 1..19: mol_type = other RNA
ttccctggcctgattttct

SEQ ID NO: 1306 - RNA, 19 nt, synthetic construct
  source 1..19: mol_type = other RNA
tcggtaaccttccctggcc

SEQ ID NO: 1307 - RNA, 19 nt, synthetic construct
  source 1..19: mol_type = other RNA
tatgctattgctcggtaac

SEQ ID NO: 1308 - RNA, 19 nt, synthetic construct
  source 1..19: mol_type = other RNA
tgagagatgagtatgctat

SEQ ID NO: 1309 - RNA, 19 nt, synthetic construct
  source 1..19: mol_type = other RNA
tttggctgagagatgagta

SEQ ID NO: 1310 - RNA, 19 nt, synthetic construct
  source 1..19: mol_type = other RNA
atataaaggtaactttggc

SEQ ID NO: 1311 - RNA, 19 nt, synthetic construct
  source 1..19: mol_type = other RNA
agtccaatcaatataaagg

SEQ ID NO: 1312 - RNA, 19 nt, synthetic construct
  source 1..19: mol_type = other RNA
tatggttatcagtccaatc

SEQ ID NO: 1313 - RNA, 19 nt, synthetic construct
  source 1..19: mol_type = other RNA
aaagccttatggttatcag

SEQ ID NO: 1314 - RNA, 19 nt, synthetic construct
  source 1..19: mol_type = other RNA
tctcccactagcaaagcct

SEQ ID NO: 1315 - RNA, 19 nt, synthetic construct
  source 1..19: mol_type = other RNA
tattcagatgttctcccac

SEQ ID NO: 1316 - RNA, 19 nt, synthetic construct
  source 1..19: mol_type = other RNA
taacaataatattcagatg

SEQ ID NO: 1317 - RNA, 19 nt, synthetic construct
  source 1..19: mol_type = other RNA
tttgggggtaacaataata

SEQ ID NO: 1318 - RNA, 19 nt, synthetic construct
  source 1..19: mol_type = other RNA
caatatatgggcttttggg

SEQ ID NO: 1319 - RNA, 19 nt, synthetic construct
  source 1..19: mol_type = other RNA
tcaatatatgggcttttgg

SEQ ID NO: 1320 - RNA, 19 nt, synthetic construct
  source 1..19: mol_type = other RNA
gtcaatatatgggcttttg

SEQ ID NO: 1321 - RNA, 19 nt, synthetic construct
  source 1..19: mol_type = other RNA
tgtcaatatatgggctttt

SEQ ID NO: 1322 - RNA, 19 nt, synthetic construct
  source 1..19: mol_type = other RNA
ttgtcaatatatgggcttt

SEQ ID NO: 1323 - RNA, 19 nt, synthetic construct
  source 1..19: mol_type = other RNA
tttgtcaatatatgggctt

SEQ ID NO: 1324 - RNA, 19 nt, synthetic construct
  source 1..19: mol_type = other RNA
ttttgtcaatatatgggct

SEQ ID NO: 1325 - RNA, 19 nt, synthetic construct
  source 1..19: mol_type = other RNA
attttgtcaatatatgggc

SEQ ID NO: 1326 - RNA, 19 nt, synthetic construct
  source 1..19: mol_type = other RNA
tattttgtcaatatatggg

SEQ ID NO: 1327 - RNA, 19 nt, synthetic construct
  source 1..19: mol_type = other RNA
ttattttgtcaatatatgg

SEQ ID NO: 1328 - RNA, 19 nt, synthetic construct
  source 1..19: mol_type = other RNA
gttattttgtcaatatatg

SEQ ID NO: 1329 - RNA, 19 nt, synthetic construct
  source 1..19: mol_type = other RNA
agttattttgtcaatatat

SEQ ID NO: 1330 - RNA, 19 nt, synthetic construct
  source 1..19: mol_type = other RNA
gagttattttgtcaatata

SEQ ID NO: 1331 - RNA, 19 nt, synthetic construct
  source 1..19: mol_type = other RNA
tgagttattttgtcaatat

SEQ ID NO: 1332 - RNA, 19 nt, synthetic construct
  source 1..19: mol_type = other RNA
gtgagttattttgtcaata

SEQ ID NO: 1333 - RNA, 19 nt, synthetic construct
  source 1..19: mol_type = other RNA
agtgagttattttgtcaat

SEQ ID NO: 1334 - RNA, 19 nt, synthetic construct
  source 1..19: mol_type = other RNA
tagtgagttattttgtcaa

SEQ ID NO: 1335 - RNA, 19 nt, synthetic construct
  source 1..19: mol_type = other RNA
atagtgagttattttgtca

SEQ ID NO: 1336 - RNA, 19 nt, synthetic construct
  source 1..19: mol_type = other RNA
tatagtgagttattttgtc

SEQ ID NO: 1337 - RNA, 19 nt, synthetic construct
  source 1..19: mol_type = other RNA
aattatagtgagttatttt

SEQ ID NO: 1338 - RNA, 19 nt, synthetic construct
  source 1..19: mol_type = other RNA
taattatagtgagttattt

SEQ ID NO: 1339 - RNA, 19 nt, synthetic construct
  source 1..19: mol_type = other RNA
gtaattatagtgagttatt

SEQ ID NO: 1340 - RNA, 19 nt, synthetic construct
  source 1..19: mol_type = other RNA
agtaattatagtgagttat

SEQ ID NO: 1341 - RNA, 19 nt, synthetic construct
  source 1..19: mol_type = other RNA
caagtaattatagtgagtt

SEQ ID NO: 1342 - RNA, 19 nt, synthetic construct
  source 1..19: mol_type = other RNA
tcaagtaattatagtgagt

SEQ ID NO: 1343 - RNA, 19 nt, synthetic construct
  source 1..19: mol_type = other RNA
atcaagtaattatagtgag

SEQ ID NO: 1344 - RNA, 19 nt, synthetic construct
  source 1..19: mol_type = other RNA
aatcaagtaattatagtga

SEQ ID NO: 1345 - RNA, 19 nt, synthetic construct
  source 1..19: mol_type = other RNA
aaaatcaagtaattatagt

SEQ ID NO: 1346 - RNA, 19 nt, synthetic construct
  source 1..19: mol_type = other RNA
taaaatcaagtaattatag

SEQ ID NO: 1347 - RNA, 19 nt, synthetic construct
  source 1..19: mol_type = other RNA
ataaaatcaagtaattata

SEQ ID NO: 1348 - RNA, 19 nt, synthetic construct
  source 1..19: mol_type = other RNA
gataaaatcaagtaattat

SEQ ID NO: 1349 - RNA, 19 nt, synthetic construct
  source 1..19: mol_type = other RNA
ggataaaatcaagtaatta

SEQ ID NO: 1350 - RNA, 19 nt, synthetic construct
  source 1..19: mol_type = other RNA
tggataaaatcaagtaatt

SEQ ID NO: 1351 - RNA, 19 nt, synthetic construct
  source 1..19: mol_type = other RNA
ttggataaaatcaagtaat

SEQ ID NO: 1352 - RNA, 19 nt, synthetic construct
  source 1..19: mol_type = other RNA
taattttgcccttggataa

SEQ ID NO: 1353 - RNA, 19 nt, synthetic construct
  source 1..19: mol_type = other RNA
ccaaagtggataattttgc

SEQ ID NO: 1354 - RNA, 19 nt, synthetic construct
  source 1..19: mol_type = other RNA
tctccctcgtgccaaagtg

SEQ ID NO: 1355 - RNA, 19 nt, synthetic construct
  source 1..19: mol_type = other RNA
tctgaaaatttctccctcg

SEQ ID NO: 1356 - RNA, 19 nt, synthetic construct
  source 1..19: mol_type = other RNA
ataagatgcatctgaaaat

SEQ ID NO: 1357 - RNA, 19 nt, synthetic construct
  source 1..19: mol_type = other RNA
ttatactttgataagatgc

SEQ ID NO: 1358 - RNA, 19 nt, synthetic construct
  source 1..19: mol_type = other RNA
ctggaatgtttatactttg

SEQ ID NO: 1359 - RNA, 19 nt, synthetic construct
  source 1..19: mol_type = other RNA
tgttctgtgttactggaat

SEQ ID NO: 1360 - RNA, 19 nt, synthetic construct
  source 1..19: mol_type = other RNA
gaaggaaccatgttctgtg

SEQ ID NO: 1361 - RNA, 19 nt, synthetic construct
  source 1..19: mol_type = other RNA
aagtcgggatgaaggaacc

SEQ ID NO: 1362 - RNA, 19 nt, synthetic construct
  source 1..19: mol_type = other RNA
taatagaccagaagtcggg

SEQ ID NO: 1363 - RNA, 19 nt, synthetic construct
  source 1..19: mol_type = other RNA
tgtgacgatgtaatagacc

SEQ ID NO: 1364 - RNA, 19 nt, synthetic construct
  source 1..19: mol_type = other RNA
tctgttctcctgtgacgat

SEQ ID NO: 1365 - RNA, 19 nt, synthetic construct
  source 1..19: mol_type = other RNA
tctgctgtctgttctcctg

SEQ ID NO: 1366 - RNA, 19 nt, synthetic construct
  source 1..19: mol_type = other RNA
tcagacactaattctgctg

SEQ ID NO: 1367 - RNA, 19 nt, synthetic construct
  source 1..19: mol_type = other RNA
accagactgaatcagacac

SEQ ID NO: 1368 - RNA, 19 nt, synthetic construct
  source 1..19: mol_type = other RNA
tcaatatttaaccagactg

SEQ ID NO: 1369 - RNA, 19 nt, synthetic construct
  source 1..19: mol_type = other RNA
tttttcttcaatatttaac

SEQ ID NO: 1370 - RNA, 19 nt, synthetic construct
  source 1..19: mol_type = other RNA
ctggttgccacatttttct

SEQ ID NO: 1371 - RNA, 19 nt, synthetic construct
  source 1..19: mol_type = other RNA
tgaacctggagctggttgc

SEQ ID NO: 1372 - RNA, 19 nt, synthetic construct
  source 1..19: mol_type = other RNA
agacagatgaacctggagc

SEQ ID NO: 1373 - RNA, 19 nt, synthetic construct
  source 1..19: mol_type = other RNA
tctgcatcaggagacagat

SEQ ID NO: 1374 - RNA, 19 nt, synthetic construct
  source 1..19: mol_type = other RNA
gagaatatgcatctgcatc

SEQ ID NO: 1375 - RNA, 19 nt, synthetic construct
  source 1..19: mol_type = other RNA
tttggcctggagaatatgc

SEQ ID NO: 1376 - RNA, 19 nt, synthetic construct
  source 1..19: mol_type = other RNA
aagagacacagtttggcct

SEQ ID NO: 1377 - RNA, 19 nt, synthetic construct
  source 1..19: mol_type = other RNA
ttgccatattaagagacac

SEQ ID NO: 1378 - RNA, 19 nt, synthetic construct
  source 1..19: mol_type = other RNA
attccagttgccatattaa

SEQ ID NO: 1379 - RNA, 19 nt, synthetic construct
  source 1..19: mol_type = other RNA
ccaggaatccattccagtt

SEQ ID NO: 1380 - RNA, 19 nt, synthetic construct
  source 1..19: mol_type = other RNA
tgctaatgccacccaggaa

SEQ ID NO: 1381 - RNA, 19 nt, synthetic construct
  source 1..19: mol_type = other RNA
gtccactgctgctaatgcc

SEQ ID NO: 1382 - RNA, 19 nt, synthetic construct
  source 1..19: mol_type = other RNA
atacacagcactgtccact

SEQ ID NO: 1383 - RNA, 19 nt, synthetic construct
  source 1..19: mol_type = other RNA
tttggactccatacacagc

SEQ ID NO: 1384 - RNA, 19 nt, synthetic construct
  source 1..19: mol_type = other RNA
tttggctcctctttggact

SEQ ID NO: 1385 - RNA, 19 nt, synthetic construct
  source 1..19: mol_type = other RNA
agggctttttggctcctct

SEQ ID NO: 1386 - RNA, 19 nt, synthetic construct
  source 1..19: mol_type = other RNA
aatactctttccaagggct

SEQ ID NO: 1387 - RNA, 19 nt, synthetic construct
  source 1..19: mol_type = other RNA
taagaattgaaatactctt

SEQ ID NO: 1388 - RNA, 19 nt, synthetic construct
  source 1..19: mol_type = other RNA
tcttctctaagaattgaaa

SEQ ID NO: 1389 - RNA, 19 nt, synthetic construct
  source 1..19: mol_type = other RNA
agcccagatcactcttctc

SEQ ID NO: 1390 - RNA, 19 nt, synthetic construct
  source 1..19: mol_type = other RNA
tgccccacagcccagatca

SEQ ID NO: 1391 - RNA, 19 nt, synthetic construct
  source 1..19: mol_type = other RNA
tgaggccaccacctgcccc

SEQ ID NO: 1392 - RNA, 19 nt, synthetic construct
  source 1..19: mol_type = other RNA
ttggcattgttgaggccac

SEQ ID NO: 1393 - RNA, 19 nt, synthetic construct
  source 1..19: mol_type = other RNA
gaacacattggcattgttg

SEQ ID NO: 1394 - RNA, 19 nt, synthetic construct
  source 1..19: mol_type = other RNA
agctaggtggaacacattg

SEQ ID NO: 1395 - RNA, 19 nt, synthetic construct
  source 1..19: mol_type = other RNA
aggtaagtccagctaggtg

SEQ ID NO: 1396 - RNA, 19 nt, synthetic construct
  source 1..19: mol_type = other RNA
ttagtgaggaaggtaagtc

SEQ ID NO: 1397 - RNA, 19 nt, synthetic construct
  source 1..19: mol_type = other RNA
tctgcatttgcattagtga

SEQ ID NO: 1398 - RNA, 19 nt, synthetic construct
  source 1..19: mol_type = other RNA
ttgggagtcatctgcattt

SEQ ID NO: 1399 - RNA, 19 nt, synthetic construct
  source 1..19: mol_type = other RNA
ttcatcattttcttgggag

SEQ ID NO: 1400 - RNA, 19 nt, synthetic construct
  source 1..19: mol_type = other RNA
tgagaatttctttacaagg

SEQ ID NO: 1401 - RNA, 19 nt, synthetic construct
  source 1..19: mol_type = other RNA
tcttcttggcctgagaatt

SEQ ID NO: 1402 - RNA, 19 nt, synthetic construct
  source 1..19: mol_type = other RNA
tttgcagcgttcttcttgg

SEQ ID NO: 1403 - RNA, 19 nt, synthetic construct
  source 1..19: mol_type = other RNA
tctatcttcttttgcagcg

SEQ ID NO: 1404 - RNA, 19 nt, synthetic construct
  source 1..19: mol_type = other RNA
tatttcttctatcttcttt

SEQ ID NO: 1405 - RNA, 19 nt, synthetic construct
  source 1..19: mol_type = other RNA
atatttagcagctatttct

SEQ ID NO: 1406 - RNA, 19 nt, synthetic construct
  source 1..19: mol_type = other RNA
aatgtttatatttagcagc

SEQ ID NO: 1407 - RNA, 19 nt, synthetic construct
  source 1..19: mol_type = other RNA
tttcttcactactgaatgt

SEQ ID NO: 1408 - RNA, 19 nt, synthetic construct
  source 1..19: mol_type = other RNA
aacaacatttcttcactac

SEQ ID NO: 1409 - RNA, 19 nt, synthetic construct
  source 1..19: mol_type = other RNA
ctccatcgtaacaacattt

SEQ ID NO: 1410 - RNA, 19 nt, synthetic construct
  source 1..19: mol_type = other RNA
attaacgcaggctccatcg

SEQ ID NO: 1411 - RNA, 19 nt, synthetic construct
  source 1..19: mol_type = other RNA
ggtttcatcattattaacg

SEQ ID NO: 1412 - RNA, 19 nt, synthetic construct
  source 1..19: mol_type = other RNA
tgctcacaggtttcatcat

SEQ ID NO: 1413 - RNA, 19 nt, synthetic construct
  source 1..19: mol_type = other RNA
tgcagctcgctgctcacag

SEQ ID NO: 1414 - RNA, 19 nt, synthetic construct
  source 1..19: mol_type = other RNA
aactaatccgtgcagctcg

SEQ ID NO: 1415 - RNA, 19 nt, synthetic construct
  source 1..19: mol_type = other RNA
cttggccctaaactaatcc

SEQ ID NO: 1416 - RNA, 19 nt, synthetic construct
  source 1..19: mol_type = other RNA
ctttgatgcatcttggccc

SEQ ID NO: 1417 - RNA, 19 nt, synthetic construct
  source 1..19: mol_type = other RNA
ttcagtgaaagctttgatg

SEQ ID NO: 1418 - RNA, 19 nt, synthetic construct
  source 1..19: mol_type = other RNA
cacaacattcagtgaaagc

SEQ ID NO: 1419 - RNA, 19 nt, synthetic construct
  source 1..19: mol_type = other RNA
cttgcgacgacacaacatt

SEQ ID NO: 1420 - RNA, 19 nt, synthetic construct
  source 1..19: mol_type = other RNA
acggagctggcttgcgacg

SEQ ID NO: 1421 - RNA, 19 nt, synthetic construct
  source 1..19: mol_type = other RNA
agagatattagcacggagc

SEQ ID NO: 1422 - RNA, 19 nt, synthetic construct
  source 1..19: mol_type = other RNA
tctttatgagagatattag

SEQ ID NO: 1423 - RNA, 19 nt, synthetic construct
  source 1..19: mol_type = other RNA
ttcccaattgcatgtcttt

SEQ ID NO: 1424 - RNA, 19 nt, synthetic construct
  source 1..19: mol_type = other RNA
tgtgtagccttcccaattg

SEQ ID NO: 1425 - RNA, 19 nt, synthetic construct
  source 1..19: mol_type = other RNA
cagggtcttcatgtgtagc

SEQ ID NO: 1426 - RNA, 19 nt, synthetic construct
  source 1..19: mol_type = other RNA
tggtaacagggtcttcatg

SEQ ID NO: 1427 - RNA, 19 nt, synthetic construct
  source 1..19: mol_type = other RNA
tctggcttgcttactggta

SEQ ID NO: 1428 - RNA, 19 nt, synthetic construct
  source 1..19: mol_type = other RNA
tccgaatttctggcttgct

SEQ ID NO: 1429 - RNA, 19 nt, synthetic construct
  source 1..19: mol_type = other RNA
aaaataactccgaatttct

SEQ ID NO: 1430 - RNA, 19 nt, synthetic construct
  source 1..19: mol_type = other RNA
agctttctggaaaataact

SEQ ID NO: 1431 - RNA, 19 nt, synthetic construct
  source 1..19: mol_type = other RNA
tcccacaaccagctttctg

SEQ ID NO: 1432 - RNA, 19 nt, synthetic construct
  source 1..19: mol_type = other RNA
aacaagatgaacttcccac

SEQ ID NO: 1433 - RNA, 19 nt, synthetic construct
  source 1..19: mol_type = other RNA
tcttctgggaacaagatga

SEQ ID NO: 1434 - RNA, 19 nt, synthetic construct
  source 1..19: mol_type = other RNA
tgcaactgttttcttctgg

SEQ ID NO: 1435 - RNA, 19 nt, synthetic construct
  source 1..19: mol_type = other RNA
gtagggcaaactgcaactg

SEQ ID NO: 1436 - RNA, 19 nt, synthetic construct
  source 1..19: mol_type = other RNA
aatcaggtagggcaaactg

SEQ ID NO: 1437 - RNA, 19 nt, synthetic construct
  source 1..19: mol_type = other RNA
aggtggttagagaatcagg

SEQ ID NO: 1438 - RNA, 19 nt, synthetic construct
  source 1..19: mol_type = other RNA
cttgaatttcccaggtggt

SEQ ID NO: 1439 - RNA, 19 nt, synthetic construct
  source 1..19: mol_type = other RNA
tgccaacgccttgaatttc

SEQ ID NO: 1440 - RNA, 19 nt, synthetic construct
  source 1..19: mol_type = other RNA
agtgtttgaaatgccaacg

SEQ ID NO: 1441 - RNA, 19 nt, synthetic construct
  source 1..19: mol_type = other RNA
tataccagtgtttgaaatg

SEQ ID NO: 1442 - RNA, 19 nt, synthetic construct
  source 1..19: mol_type = other RNA
gtatcagcaacacatatac

SEQ ID NO: 1443 - RNA, 19 nt, synthetic construct
  source 1..19: mol_type = other RNA
tgccttgacagtatcagca

SEQ ID NO: 1444 - RNA, 19 nt, synthetic construct
  source 1..19: mol_type = other RNA
aacacctttgccttgacag

SEQ ID NO: 1445 - RNA, 19 nt, synthetic construct
  source 1..19: mol_type = other RNA
aagacatctttgaacacct

SEQ ID NO: 1446 - RNA, 19 nt, synthetic construct
  source 1..19: mol_type = other RNA
ttccaggaagacatctttg

SEQ ID NO: 1447 - RNA, 19 nt, synthetic construct
  source 1..19: mol_type = other RNA
tatattcatttccaggaag

SEQ ID NO: 1448 - RNA, 19 nt, synthetic construct
  source 1..19: mol_type = other RNA
aacagaatatggtatattc

SEQ ID NO: 1449 - RNA, 19 nt, synthetic construct
  source 1..19: mol_type = other RNA
tcctcgtacaacagaatat

SEQ ID NO: 1450 - RNA, 19 nt, synthetic construct
  source 1..19: mol_type = other RNA
attggatctgttctcctcg

SEQ ID NO: 1451 - RNA, 19 nt, synthetic construct
  source 1..19: mol_type = other RNA
ctttcaattggatctgttc

SEQ ID NO: 1452 - RNA, 19 nt, synthetic construct
  source 1..19: mol_type = other RNA
gttgtaaacagttcctttc

SEQ ID NO: 1453 - RNA, 19 nt, synthetic construct
  source 1..19: mol_type = other RNA
tcctatagttgtaaacagt

SEQ ID NO: 1454 - RNA, 19 nt, synthetic construct
  source 1..19: mol_type = other RNA
tcccagaagtcctatagtt

SEQ ID NO: 1455 - RNA, 19 nt, synthetic construct
  source 1..19: mol_type = other RNA
aacacagaactgcatccca

SEQ ID NO: 1456 - RNA, 19 nt, synthetic construct
  source 1..19: mol_type = other RNA
agacattttaacacagaac

SEQ ID NO: 1457 - RNA, 19 nt, synthetic construct
  source 1..19: mol_type = other RNA
tccacagcagacattttaa

SEQ ID NO: 1458 - RNA, 19 nt, synthetic construct
  source 1..19: mol_type = other RNA
gtgcagattccctccacag

SEQ ID NO: 1459 - RNA, 19 nt, synthetic construct
  source 1..19: mol_type = other RNA
tttccgaagtgcagattcc

SEQ ID NO: 1460 - RNA, 19 nt, synthetic construct
  source 1..19: mol_type = other RNA
tcaatgactgggctttccg

SEQ ID NO: 1461 - RNA, 19 nt, synthetic construct
  source 1..19: mol_type = other RNA
cctgatgatcaatgactgg

SEQ ID NO: 1462 - RNA, 19 nt, synthetic construct
  source 1..19: mol_type = other RNA
aggactttgtgccctgatg

SEQ ID NO: 1463 - RNA, 19 nt, synthetic construct
  source 1..19: mol_type = other RNA
atttggaggactttgtgcc

SEQ ID NO: 1464 - RNA, 19 nt, synthetic construct
  source 1..19: mol_type = other RNA
tttctggcgcacacatttg

SEQ ID NO: 1465 - RNA, 19 nt, synthetic construct
  source 1..19: mol_type = other RNA
gccctctactttctggcgc

SEQ ID NO: 1466 - RNA, 19 nt, synthetic construct
  source 1..19: mol_type = other RNA
actggaggagccctctact

SEQ ID NO: 1467 - RNA, 19 nt, synthetic construct
  source 1..19: mol_type = other RNA
gtcaccaagtgactggagg

SEQ ID NO: 1468 - RNA, 19 nt, synthetic construct
  source 1..19: mol_type = other RNA
agtgaatgtcaccaagtga

SEQ ID NO: 1469 - RNA, 19 nt, synthetic construct
  source 1..19: mol_type = other RNA
agaggaagcacagtgaatg

SEQ ID NO: 1470 - RNA, 19 nt, synthetic construct
  source 1..19: mol_type = other RNA
gttgtgaaggccaatttcc

SEQ ID NO: 1471 - RNA, 19 nt, synthetic construct
  source 1..19: mol_type = other RNA
aaaaattgatgttgtgaag

SEQ ID NO: 1472 - RNA, 19 nt, synthetic construct
  source 1..19: mol_type = other RNA
aagtctccagtgaaaaatt

SEQ ID NO: 1473 - RNA, 19 nt, synthetic construct
  source 1..19: mol_type = other RNA
ttccaaaccaagtctccag

SEQ ID NO: 1474 - RNA, 19 nt, synthetic construct
  source 1..19: mol_type = other RNA
aagatttcttttccaaacc

SEQ ID NO: 1475 - RNA, 19 nt, synthetic construct
  source 1..19: mol_type = other RNA
taatgtttttactaagatt

SEQ ID NO: 1476 - RNA, 19 nt, synthetic construct
  source 1..19: mol_type = other RNA
caccactcgtaatgttttt

SEQ ID NO: 1477 - RNA, 19 nt, synthetic construct
  source 1..19: mol_type = other RNA
acaccttctggcaccactc

SEQ ID NO: 1478 - RNA, 19 nt, synthetic construct
  source 1..19: mol_type = other RNA
ttcccttttgacaccttct

SEQ ID NO: 1479 - RNA, 19 nt, synthetic construct
  source 1..19: mol_type = other RNA
atagctttcccttttgaca

SEQ ID NO: 1480 - RNA, 19 nt, synthetic construct
  source 1..19: mol_type = other RNA
aaagtaacaccagaatagc

SEQ ID NO: 1481 - RNA, 19 nt, synthetic construct
  source 1..19: mol_type = other RNA
ctaggatccaaagtaacac

SEQ ID NO: 1482 - RNA, 19 nt, synthetic construct
  source 1..19: mol_type = other RNA
ataaatacccctaggatcc

SEQ ID NO: 1483 - RNA, 19 nt, synthetic construct
  source 1..19: mol_type = other RNA
taatggtaccataaatacc

SEQ ID NO: 1484 - RNA, 19 nt, synthetic construct
  source 1..19: mol_type = other RNA
tttcgtctgctaatggtac

SEQ ID NO: 1485 - RNA, 19 nt, synthetic construct
  source 1..19: mol_type = other RNA
tgggaactcctttcgtctg

SEQ ID NO: 1486 - RNA, 19 nt, synthetic construct
  source 1..19: mol_type = other RNA
atcctgtatgggaactcct

SEQ ID NO: 1487 - RNA, 19 nt, synthetic construct
  source 1..19: mol_type = other RNA
tctaagggtatcctgtatg

SEQ ID NO: 1488 - RNA, 19 nt, synthetic construct
  source 1..19: mol_type = other RNA
tttggggaccaaatctaag

SEQ ID NO: 1489 - RNA, 19 nt, synthetic construct
  source 1..19: mol_type = other RNA
ttgatttctgttttgggga

SEQ ID NO: 1490 - RNA, 19 nt, synthetic construct
  source 1..19: mol_type = other RNA
aaatccttttgatttctgt

SEQ ID NO: 1491 - RNA, 19 nt, synthetic construct
  source 1..19: mol_type = other RNA
tttacactcaaaatccttt

SEQ ID NO: 1492 - RNA, 19 nt, synthetic construct
  source 1..19: mol_type = other RNA
caagcagtccttttacact

SEQ ID NO: 1493 - RNA, 19 nt, synthetic construct
  source 1..19: mol_type = other RNA
tcacctacaagcagtcctt

SEQ ID NO: 1494 - RNA, 19 nt, synthetic construct
  source 1..19: mol_type = other RNA
cagacaagatctcacctac

SEQ ID NO: 1495 - RNA, 19 nt, synthetic construct
  source 1..19: mol_type = other RNA
ttagaactgcagacaagat

SEQ ID NO: 1496 - RNA, 19 nt, synthetic construct
  source 1..19: mol_type = other RNA
tgccttcctgacttagaac

SEQ ID NO: 1497 - RNA, 19 nt, synthetic construct
  source 1..19: mol_type = other RNA
ttaggatattgatgccttc

SEQ ID NO: 1498 - RNA, 19 nt, synthetic construct
  source 1..19: mol_type = other RNA
aggtgggttaggatattga

SEQ ID NO: 1499 - RNA, 19 nt, synthetic construct
  source 1..19: mol_type = other RNA
actccctttggggaggtgg

SEQ ID NO: 1500 - RNA, 19 nt, synthetic construct
  source 1..19: mol_type = other RNA
ctctgcactccctttgggg

SEQ ID NO: 1501 - RNA, 19 nt, synthetic construct
  source 1..19: mol_type = other RNA
atcagctccgcctctgcac

SEQ ID NO: 1502 - RNA, 19 nt, synthetic construct
  source 1..19: mol_type = other RNA
gacaacgctcatcagctcc

SEQ ID NO: 1503 - RNA, 19 nt, synthetic construct
  source 1..19: mol_type = other RNA
atagaatactgggacaacg

SEQ ID NO: 1504 - RNA, 19 nt, synthetic construct
  source 1..19: mol_type = other RNA
gaaaaacatagaatactgg

SEQ ID NO: 1505 - RNA, 19 nt, synthetic construct
  source 1..19: mol_type = other RNA
tttccaggtagtgaaaaac

SEQ ID NO: 1506 - RNA, 19 nt, synthetic construct
  source 1..19: mol_type = other RNA
atgatttcctgtttccagg

SEQ ID NO: 1507 - RNA, 19 nt, synthetic construct
  source 1..19: mol_type = other RNA
tcagaatgaaaaatgttcc

SEQ ID NO: 1508 - RNA, 19 nt, synthetic construct
  source 1..19: mol_type = other RNA
caattaatgggtcagaatg

SEQ ID NO: 1509 - RNA, 19 nt, synthetic construct
  source 1..19: mol_type = other RNA
tctgcttttcaattaatgg

SEQ ID NO: 1510 - RNA, 19 nt, synthetic construct
  source 1..19: mol_type = other RNA
tttcttcagtttctgcttt

SEQ ID NO: 1511 - RNA, 19 nt, synthetic construct
  source 1..19: mol_type = other RNA
tttaattttttcttcagtt

SEQ ID NO: 1512 - RNA, 19 nt, synthetic construct
  source 1..19: mol_type = other RNA
tcccttcttttaatttttt

SEQ ID NO: 1513 - RNA, 19 nt, synthetic construct
  source 1..19: mol_type = other RNA
cataatgctcaacatccct

SEQ ID NO: 1514 - RNA, 19 nt, synthetic construct
  source 1..19: mol_type = other RNA
tctgtaggacataatgctc

SEQ ID NO: 1515 - RNA, 19 nt, synthetic construct
  source 1..19: mol_type = other RNA
tcagcatttctgtaggaca

SEQ ID NO: 1516 - RNA, 19 nt, synthetic construct
  source 1..19: mol_type = other RNA
tgtaagagtagtcagcatt

SEQ ID NO: 1517 - RNA, 19 nt, synthetic construct
  source 1..19: mol_type = other RNA
tccacacactgtaagagta

SEQ ID NO: 1518 - RNA, 19 nt, synthetic construct
  source 1..19: mol_type = other RNA
ttccacccttccacacact

SEQ ID NO: 1519 - RNA, 19 nt, synthetic construct
  source 1..19: mol_type = other RNA
agtgctagcacttccaccc

SEQ ID NO: 1520 - RNA, 19 nt, synthetic construct
  source 1..19: mol_type = other RNA
ctgttaaccaagtgctagc

SEQ ID NO: 1521 - RNA, 19 nt, synthetic construct
  source 1..19: mol_type = other RNA
aaagcaaaagctgttaacc

SEQ ID NO: 1522 - RNA, 19 nt, synthetic construct
  source 1..19: mol_type = other RNA
tccaagtactcttaaagca

SEQ ID NO: 1523 - RNA, 19 nt, synthetic construct
  source 1..19: mol_type = other RNA
tatttacttgtccaagtac

SEQ ID NO: 1524 - RNA, 19 nt, synthetic construct
  source 1..19: mol_type = other RNA
ctacgtatttatttacttg

SEQ ID NO: 1525 - RNA, 19 nt, synthetic construct
  source 1..19: mol_type = other RNA
ttctgctctacgtatttat

SEQ ID NO: 1526 - RNA, 19 nt, synthetic construct
  source 1..19: mol_type = other RNA
ttgaattttggttctgctc

SEQ ID NO: 1527 - RNA, 19 nt, synthetic construct
  source 1..19: mol_type = other RNA
aagaattacaaattgaatt

SEQ ID NO: 1528 - RNA, 19 nt, synthetic construct
  source 1..19: mol_type = other RNA
agccacaataaagaattac

SEQ ID NO: 1529 - RNA, 19 nt, synthetic construct
  source 1..19: mol_type = other RNA
attctcaactagccacaat

SEQ ID NO: 1530 - RNA, 19 nt, synthetic construct
  source 1..19: mol_type = other RNA
attgataattctcaactag

SEQ ID NO: 1531 - RNA, 19 nt, synthetic construct
  source 1..19: mol_type = other RNA
tccattatctaattgataa

SEQ ID NO: 1532 - RNA, 19 nt, synthetic construct
  source 1..19: mol_type = other RNA
tttccttgaaagatccatt

SEQ ID NO: 1533 - RNA, 19 nt, synthetic construct
  source 1..19: mol_type = other RNA
tgtgaattttccttgaaag

SEQ ID NO: 1534 - RNA, 19 nt, synthetic construct
  source 1..19: mol_type = other RNA
ttggttgatactgtgaatt

SEQ ID NO: 1535 - RNA, 19 nt, synthetic construct
  source 1..19: mol_type = other RNA
taattttattggttgatac

SEQ ID NO: 1536 - RNA, 19 nt, synthetic construct
  source 1..19: mol_type = other RNA
caaggtaccctgtaatttt

SEQ ID NO: 1537 - RNA, 19 nt, synthetic construct
  source 1..19: mol_type = other RNA
tcaacaggcaaggtaccct

SEQ ID NO: 1538 - RNA, 19 nt, synthetic construct
  source 1..19: mol_type = other RNA
tgttctctcgggcttcaac

SEQ ID NO: 1539 - RNA, 19 nt, synthetic construct
  source 1..19: mol_type = other RNA
atataagctgttctctcgg

SEQ ID NO: 1540 - RNA, 19 nt, synthetic construct
  source 1..19: mol_type = other RNA
aaggctgtaagatataagc

SEQ ID NO: 1541 - RNA, 19 nt, synthetic construct
  source 1..19: mol_type = other RNA
tcacagtaaaggctgtaag

SEQ ID NO: 1542 - RNA, 19 nt, synthetic construct
  source 1..19: mol_type = other RNA
tcgaaagcctttctaattc

SEQ ID NO: 1543 - RNA, 19 nt, synthetic construct
  source 1..19: mol_type = other RNA
ggggcatatatcgaaagcc

SEQ ID NO: 1544 - RNA, 19 nt, synthetic construct
  source 1..19: mol_type = other RNA
tcaccagggggcatatatc

SEQ ID NO: 1545 - RNA, 19 nt, synthetic construct
  source 1..19: mol_type = other RNA
agctgtgtcgattttcacc

SEQ ID NO: 1546 - RNA, 19 nt, synthetic construct
  source 1..19: mol_type = other RNA
tttaattagagctgtgtcg

SEQ ID NO: 1547 - RNA, 19 nt, synthetic construct
  source 1..19: mol_type = other RNA
tgtcagctttaattagagc

SEQ ID NO: 1548 - RNA, 19 nt, synthetic construct
  source 1..19: mol_type = other RNA
tcaagcagaaagttgtcag

SEQ ID NO: 1549 - RNA, 19 nt, synthetic construct
  source 1..19: mol_type = other RNA
tgtattttcaagcagaaag

SEQ ID NO: 1550 - RNA, 19 nt, synthetic construct
  source 1..19: mol_type = other RNA
tgggctggcagtgtatttt

SEQ ID NO: 1551 - RNA, 19 nt, synthetic construct
  source 1..19: mol_type = other RNA
tgtaaaggtgctctgggct

SEQ ID NO: 1552 - RNA, 19 nt, synthetic construct
  source 1..19: mol_type = other RNA
atggccaatgtaaaggtgc

SEQ ID NO: 1553 - RNA, 19 nt, synthetic construct
  source 1..19: mol_type = other RNA
acgcagaaatggccaatgt

SEQ ID NO: 1554 - RNA, 19 nt, synthetic construct
  source 1..19: mol_type = other RNA
agggaaagagcatacgcag

SEQ ID NO: 1555 - RNA, 19 nt, synthetic construct
  source 1..19: mol_type = other RNA
ttttatctcccagggaaag

SEQ ID NO: 1556 - RNA, 19 nt, synthetic construct
  source 1..19: mol_type = other RNA
tgtgggtgagttttatctc

SEQ ID NO: 1557 - RNA, 19 nt, synthetic construct
  source 1..19: mol_type = other RNA
aacgaaactgtgggtgagt

SEQ ID NO: 1558 - RNA, 19 nt, synthetic construct
  source 1..19: mol_type = other RNA
aaacaattgaacgaaactg

SEQ ID NO: 1559 - RNA, 19 nt, synthetic construct
  source 1..19: mol_type = other RNA
ttcaaagctgaaacaattg

SEQ ID NO: 1560 - RNA, 19 nt, synthetic construct
  source 1..19: mol_type = other RNA
aaagcttctctcttcaaag

SEQ ID NO: 1561 - RNA, 19 nt, synthetic construct
  source 1..19: mol_type = other RNA
tttaaccaaagcttctctc

SEQ ID NO: 1562 - RNA, 19 nt, synthetic construct
  source 1..19: mol_type = other RNA
tgggtggattacctttaac

SEQ ID NO: 1563 - RNA, 19 nt, synthetic construct
  source 1..19: mol_type = other RNA
aacgataaatgggtggatt

SEQ ID NO: 1564 - RNA, 19 nt, synthetic construct
  source 1..19: mol_type = other RNA
tttccaaaaacgataaatg

SEQ ID NO: 1565 - RNA, 19 nt, synthetic construct
  source 1..19: mol_type = other RNA
tgaagattgtctttccaaa

SEQ ID NO: 1566 - RNA, 19 nt, synthetic construct
  source 1..19: mol_type = other RNA
tgtctttatgctgaagatt

SEQ ID NO: 1567 - RNA, 19 nt, synthetic construct
  source 1..19: mol_type = other RNA
gtacagagctgtctttatg

SEQ ID NO: 1568 - RNA, 19 nt, synthetic construct
  source 1..19: mol_type = other RNA
accagtgttaggtacagag

SEQ ID NO: 1569 - RNA, 19 nt, synthetic construct
  source 1..19: mol_type = other RNA
atacgtgccgtaccagtgt

SEQ ID NO: 1570 - RNA, 19 nt, synthetic construct
  source 1..19: mol_type = other RNA
tgtttctaccatacgtgcc

SEQ ID NO: 1571 - RNA, 19 nt, synthetic construct
  source 1..19: mol_type = other RNA
ataggcagttgtttctacc

SEQ ID NO: 1572 - RNA, 19 nt, synthetic construct
  source 1..19: mol_type = other RNA
agtaaagcataggcagttg

SEQ ID NO: 1573 - RNA, 19 nt, synthetic construct
  source 1..19: mol_type = other RNA
ttcagactggtgagtaaag

SEQ ID NO: 1574 - RNA, 19 nt, synthetic construct
  source 1..19: mol_type = other RNA
atatctttcaagttcagac

SEQ ID NO: 1575 - RNA, 19 nt, synthetic construct
  source 1..19: mol_type = other RNA
taatttatatctttcaagt

SEQ ID NO: 1576 - RNA, 19 nt, synthetic construct
  source 1..19: mol_type = other RNA
tgggttaacataatttata

SEQ ID NO: 1577 - RNA, 19 nt, synthetic construct
  source 1..19: mol_type = other RNA
atttgatgactgggttaac

SEQ ID NO: 1578 - RNA, 19 nt, synthetic construct
  source 1..19: mol_type = other RNA
tctgatagccatttgatga

SEQ ID NO: 1579 - RNA, 19 nt, synthetic construct
  source 1..19: mol_type = other RNA
tacctctgctcttctgata

SEQ ID NO: 1580 - RNA, 19 nt, synthetic construct
  source 1..19: mol_type = other RNA
aagccacctccatacctct

SEQ ID NO: 1581 - RNA, 19 nt, synthetic construct
  source 1..19: mol_type = other RNA
gttgaataaaagccacctc

SEQ ID NO: 1582 - RNA, 19 nt, synthetic construct
  source 1..19: mol_type = other RNA
ttgtgtcctgggttgaata

SEQ ID NO: 1583 - RNA, 19 nt, synthetic construct
  source 1..19: mol_type = other RNA
atggcattgattgtgtcct

SEQ ID NO: 1584 - RNA, 19 nt, synthetic construct
  source 1..19: mol_type = other RNA
ccctcaatggcattgattg

SEQ ID NO: 1585 - RNA, 19 nt, synthetic construct
  source 1..19: mol_type = other RNA
ttccgtcaggccctcaatg

SEQ ID NO: 1586 - RNA, 19 nt, synthetic construct
  source 1..19: mol_type = other RNA
ccaggagtgaatattccgt

SEQ ID NO: 1587 - RNA, 19 nt, synthetic construct
  source 1..19: mol_type = other RNA
ttgtttaaccaggagtgaa

SEQ ID NO: 1588 - RNA, 19 nt, synthetic construct
  source 1..19: mol_type = other RNA
caagcggagttgtttaacc

SEQ ID NO: 1589 - RNA, 19 nt, synthetic construct
  source 1..19: mol_type = other RNA
gatgtccatactcaagcgg

SEQ ID NO: 1590 - RNA, 19 nt, synthetic construct
  source 1..19: mol_type = other RNA
gtaagaaacatcgatgtcc

SEQ ID NO: 1591 - RNA, 19 nt, synthetic construct
  source 1..19: mol_type = other RNA
atgcttgtaagaaacatcg

SEQ ID NO: 1592 - RNA, 19 nt, synthetic construct
  source 1..19: mol_type = other RNA
taaggcacctttatgcttg

SEQ ID NO: 1593 - RNA, 19 nt, synthetic construct
  source 1..19: mol_type = other RNA
ttataattatgtaaggcac

SEQ ID NO: 1594 - RNA, 19 nt, synthetic construct
  source 1..19: mol_type = other RNA
tgtcattttataattatgt

SEQ ID NO: 1595 - RNA, 19 nt, synthetic construct
  source 1..19: mol_type = other RNA
aattcttgtctgtcatttt

SEQ ID NO: 1596 - RNA, 19 nt, synthetic construct
  source 1..19: mol_type = other RNA
cctcccaaggaaattcttg

SEQ ID NO: 1597 - RNA, 19 nt, synthetic construct
  source 1..19: mol_type = other RNA
ctctactggcctcccaagg

SEQ ID NO: 1598 - RNA, 19 nt, synthetic construct
  source 1..19: mol_type = other RNA
attgagaagcacctctact

SEQ ID NO: 1599 - RNA, 19 nt, synthetic construct
  source 1..19: mol_type = other RNA
tgaggtcatcattgagaag

SEQ ID NO: 1600 - RNA, 19 nt, synthetic construct
  source 1..19: mol_type = other RNA
tgtactgacaatgaggtca

SEQ ID NO: 1601 - RNA, 19 nt, synthetic construct
  source 1..19: mol_type = other RNA
tgccaaatcctgtactgac

SEQ ID NO: 1602 - RNA, 19 nt, synthetic construct
  source 1..19: mol_type = other RNA
caagccactgccaaatcct

SEQ ID NO: 1603 - RNA, 19 nt, synthetic construct
  source 1..19: mol_type = other RNA
atgtactgtagccaagcca

SEQ ID NO: 1604 - RNA, 19 nt, synthetic construct
  source 1..19: mol_type = other RNA
ttgttacatgtactgtagc

SEQ ID NO: 1605 - RNA, 19 nt, synthetic construct
  source 1..19: mol_type = other RNA
tttgtgaactacagttgtt

SEQ ID NO: 1606 - RNA, 19 nt, synthetic construct
  source 1..19: mol_type = other RNA
tactggttttgtgaactac

SEQ ID NO: 1607 - RNA, 19 nt, synthetic construct
  source 1..19: mol_type = other RNA
tcctcagaggtactggttt

SEQ ID NO: 1608 - RNA, 19 nt, synthetic construct
  source 1..19: mol_type = other RNA
aaagctgcaaacttcctca

SEQ ID NO: 1609 - RNA, 19 nt, synthetic construct
  source 1..19: mol_type = other RNA
ttttcaaataaaagctgca

SEQ ID NO: 1610 - RNA, 19 nt, synthetic construct
  source 1..19: mol_type = other RNA
tgagtatcgattttcaaat

SEQ ID NO: 1611 - RNA, 19 nt, synthetic construct
  source 1..19: mol_type = other RNA
ttcaatatcctgagtatcg

SEQ ID NO: 1612 - RNA, 19 nt, synthetic construct
  source 1..19: mol_type = other RNA
gtgggatgcttcaatatcc

SEQ ID NO: 1613 - RNA, 19 nt, synthetic construct
  source 1..19: mol_type = other RNA
ctctgtagtgggatgcttc

SEQ ID NO: 1614 - RNA, 19 nt, synthetic construct
  source 1..19: mol_type = other RNA
tttccgtagcctctgtagt

SEQ ID NO: 1615 - RNA, 19 nt, synthetic construct
  source 1..19: mol_type = other RNA
tttgtaatcagagtttccg

SEQ ID NO: 1616 - RNA, 19 nt, synthetic construct
  source 1..19: mol_type = other RNA
tactatgcgtttgtaatca

SEQ ID NO: 1617 - RNA, 19 nt, synthetic construct
  source 1..19: mol_type = other RNA
ctggcacatgctactatgc

SEQ ID NO: 1618 - RNA, 19 nt, synthetic construct
  source 1..19: mol_type = other RNA
gcttgtagctggcacatgc

SEQ ID NO: 1619 - RNA, 19 nt, synthetic construct
  source 1..19: mol_type = other RNA
ttccctgctgggcttgtag

SEQ ID NO: 1620 - RNA, 19 nt, synthetic construct
  source 1..19: mol_type = other RNA
tgatgattcttccctgctg

SEQ ID NO: 1621 - RNA, 19 nt, synthetic construct
  source 1..19: mol_type = other RNA
aggatccagatgatgattc

SEQ ID NO: 1622 - RNA, 19 nt, synthetic construct
  source 1..19: mol_type = other RNA
atcaccgcatgagaggatc

SEQ ID NO: 1623 - RNA, 19 nt, synthetic construct
  source 1..19: mol_type = other RNA
atgtccatcaccgcatgag

SEQ ID NO: 1624 - RNA, 19 nt, synthetic construct
  source 1..19: mol_type = other RNA
aggcaaggagatgtccatc

SEQ ID NO: 1625 - RNA, 19 nt, synthetic construct
  source 1..19: mol_type = other RNA
actgattccagtaggcaag

SEQ ID NO: 1626 - RNA, 19 nt, synthetic construct
  source 1..19: mol_type = other RNA
tcttcatttgcactgattc

SEQ ID NO: 1627 - RNA, 19 nt, synthetic construct
  source 1..19: mol_type = other RNA
ttttaagtcttcttcattt

SEQ ID NO: 1628 - RNA, 19 nt, synthetic construct
  source 1..19: mol_type = other RNA
caagggcttttaagtcttc

SEQ ID NO: 1629 - RNA, 19 nt, synthetic construct
  source 1..19: mol_type = other RNA
atccaccccttccacaagg

SEQ ID NO: 1630 - RNA, 19 nt, synthetic construct
  source 1..19: mol_type = other RNA
atagttgatccaccccttc

SEQ ID NO: 1631 - RNA, 19 nt, synthetic construct
  source 1..19: mol_type = other RNA
taatcagtgaatagttgat

SEQ ID NO: 1632 - RNA, 19 nt, synthetic construct
  source 1..19: mol_type = other RNA
tttgatttggtaatcagtg

SEQ ID NO: 1633 - RNA, 19 nt, synthetic construct
  source 1..19: mol_type = other RNA
taacatgtccatctttgat

SEQ ID NO: 1634 - RNA, 19 nt, synthetic construct
  source 1..19: mol_type = other RNA
gttgcagaataacatgtcc

SEQ ID NO: 1635 - RNA, 19 nt, synthetic construct
  source 1..19: mol_type = other RNA
aatcgaattcagttgcaga

SEQ ID NO: 1636 - RNA, 19 nt, synthetic construct
  source 1..19: mol_type = other RNA
actggagggaatcgaattc

SEQ ID NO: 1637 - RNA, 19 nt, synthetic construct
  source 1..19: mol_type = other RNA
aaaggaaatcactggaggg

SEQ ID NO: 1638 - RNA, 19 nt, synthetic construct
  source 1..19: mol_type = other RNA
atcgtacacaaaggaaatc

SEQ ID NO: 1639 - RNA, 19 nt, synthetic construct
  source 1..19: mol_type = other RNA
caaatatccggaatcgtac

SEQ ID NO: 1640 - RNA, 19 nt, synthetic construct
  source 1..19: mol_type = other RNA
caaagagttcaaatatccg

SEQ ID NO: 1641 - RNA, 19 nt, synthetic construct
  source 1..19: mol_type = other RNA
aaacccaacttcaaagagt

SEQ ID NO: 1642 - RNA, 19 nt, synthetic construct
  source 1..19: mol_type = other RNA
aggactgagaaacccaact

SEQ ID NO: 1643 - RNA, 19 nt, synthetic construct
  source 1..19: mol_type = other RNA
aaagtggcaggactgagaa

SEQ ID NO: 1644 - RNA, 19 nt, synthetic construct
  source 1..19: mol_type = other RNA
ttcgtacactgtgaaagtg

SEQ ID NO: 1645 - RNA, 19 nt, synthetic construct
  source 1..19: mol_type = other RNA
gtggtattcgtacactgtg

SEQ ID NO: 1646 - RNA, 19 nt, synthetic construct
  source 1..19: mol_type = other RNA
tgtttatctggtctgtggt

SEQ ID NO: 1647 - RNA, 19 nt, synthetic construct
  source 1..19: mol_type = other RNA
tggtacactgtttatctgg

SEQ ID NO: 1648 - RNA, 19 nt, synthetic construct
  source 1..19: mol_type = other RNA
tataaaacatggtacactg

SEQ ID NO: 1649 - RNA, 19 nt, synthetic construct
  source 1..19: mol_type = other RNA
attggaagtgctataaaac

SEQ ID NO: 1650 - RNA, 19 nt, synthetic construct
  source 1..19: mol_type = other RNA
tgaattttgatattggaag

SEQ ID NO: 1651 - RNA, 19 nt, synthetic construct
  source 1..19: mol_type = other RNA
agactttctgaattttgat

SEQ ID NO: 1652 - RNA, 19 nt, synthetic construct
  source 1..19: mol_type = other RNA
ggctccttcacagactttc

SEQ ID NO: 1653 - RNA, 19 nt, synthetic construct
  source 1..19: mol_type = other RNA
acttgcacgcggctccttc

SEQ ID NO: 1654 - RNA, 19 nt, synthetic construct
  source 1..19: mol_type = other RNA
gcttctacacacttgcacg

SEQ ID NO: 1655 - RNA, 19 nt, synthetic construct
  source 1..19: mol_type = other RNA
gcccacaatcagcttctac

SEQ ID NO: 1656 - RNA, 19 nt, synthetic construct
  source 1..19: mol_type = other RNA
tgcatttgcccacaatcag

SEQ ID NO: 1657 - RNA, 19 nt, synthetic construct
  source 1..19: mol_type = other RNA
caattcttcctgcatttgc

SEQ ID NO: 1658 - RNA, 19 nt, synthetic construct
  source 1..19: mol_type = other RNA
ttgtcagatccaattcttc

SEQ ID NO: 1659 - RNA, 19 nt, synthetic construct
  source 1..19: mol_type = other RNA
tctctgcagagattgtcag

SEQ ID NO: 1660 - RNA, 19 nt, synthetic construct
  source 1..19: mol_type = other RNA
tttgttttcttgtctctgc

SEQ ID NO: 1661 - RNA, 19 nt, synthetic construct
  source 1..19: mol_type = other RNA
catgctgtttgttttcttg

SEQ ID NO: 1662 - RNA, 19 nt, synthetic construct
  source 1..19: mol_type = other RNA
tctctggtttacatgctgt

SEQ ID NO: 1663 - RNA, 19 nt, synthetic construct
  source 1..19: mol_type = other RNA
aagcatatgcaatctctgg

SEQ ID NO: 1664 - RNA, 19 nt, synthetic construct
  source 1..19: mol_type = other RNA
taactttataagcatatgc

SEQ ID NO: 1665 - RNA, 19 nt, synthetic construct
  source 1..19: mol_type = other RNA
tgtgatgctaactttataa

SEQ ID NO: 1666 - RNA, 19 nt, synthetic construct
  source 1..19: mol_type = other RNA
tacagtgatggatgtgatg

SEQ ID NO: 1667 - RNA, 19 nt, synthetic construct
  source 1..19: mol_type = other RNA
aaaacattttctacagtga

SEQ ID NO: 1668 - RNA, 19 nt, synthetic construct
  source 1..19: mol_type = other RNA
cttgacaaaaacattttct

SEQ ID NO: 1669 - RNA, 19 nt, synthetic construct
  source 1..19: mol_type = other RNA
ttgccttgtacttgacaaa

SEQ ID NO: 1670 - RNA, 19 nt, synthetic construct
  source 1..19: mol_type = other RNA
atatccagaagggttgcct

SEQ ID NO: 1671 - RNA, 19 nt, synthetic construct
  source 1..19: mol_type = other RNA
tttgtagatatccagaagg

SEQ ID NO: 1672 - RNA, 19 nt, synthetic construct
  source 1..19: mol_type = other RNA
ttccccagttttgtagata

SEQ ID NO: 1673 - RNA, 19 nt, synthetic construct
  source 1..19: mol_type = other RNA
tcagcaacagcttccccag

SEQ ID NO: 1674 - RNA, 19 nt, synthetic construct
  source 1..19: mol_type = other RNA
gagtctttctcagcaacag

SEQ ID NO: 1675 - RNA, 19 nt, synthetic construct
  source 1..19: mol_type = other RNA
tgaaggtaatctcagagtc

SEQ ID NO: 1676 - RNA, 19 nt, synthetic construct
  source 1..19: mol_type = other RNA
ttttaatgaaggtaatctc

SEQ ID NO: 1677 - RNA, 19 nt, synthetic construct
  source 1..19: mol_type = other RNA
tacaggttacctttttaat

SEQ ID NO: 1678 - RNA, 19 nt, synthetic construct
  source 1..19: mol_type = other RNA
tcagcgttagtacaggtta

SEQ ID NO: 1679 - RNA, 19 nt, synthetic construct
  source 1..19: mol_type = other RNA
tttaccagctcagcgttag

SEQ ID NO: 1680 - RNA, 19 nt, synthetic construct
  source 1..19: mol_type = other RNA
gtactgtcttccttttacc

SEQ ID NO: 1681 - RNA, 19 nt, synthetic construct
  source 1..19: mol_type = other RNA
ataattaagtactgtcttc

SEQ ID NO: 1682 - RNA, 19 nt, synthetic construct
  source 1..19: mol_type = other RNA
ttctttacccataattaag

SEQ ID NO: 1683 - RNA, 19 nt, synthetic construct
  source 1..19: mol_type = other RNA
tatctggagggcttcttta

SEQ ID NO: 1684 - RNA, 19 nt, synthetic construct
  source 1..19: mol_type = other RNA
attgtattttatctggagg

SEQ ID NO: 1685 - RNA, 19 nt, synthetic construct
  source 1..19: mol_type = other RNA
tgaaactgaaattgtattt

SEQ ID NO: 1686 - RNA, 19 nt, synthetic construct
  source 1..19: mol_type = other RNA
gtagatgtacctgaaactg

SEQ ID NO: 1687 - RNA, 19 nt, synthetic construct
  source 1..19: mol_type = other RNA
tctaaagggtagatgtacc

SEQ ID NO: 1688 - RNA, 19 nt, synthetic construct
  source 1..19: mol_type = other RNA
aggtcaaggaatctaaagg

SEQ ID NO: 1689 - RNA, 19 nt, synthetic construct
  source 1..19: mol_type = other RNA
tattcaatccaggtcaagg

SEQ ID NO: 1690 - RNA, 19 nt, synthetic construct
  source 1..19: mol_type = other RNA
ctaggccagtattcaatcc

SEQ ID NO: 1691 - RNA, 19 nt, synthetic construct
  source 1..19: mol_type = other RNA
tgttgtgtctctaggccag

SEQ ID NO: 1692 - RNA, 19 nt, synthetic construct
  source 1..19: mol_type = other RNA
gatgaacatgttgtgtctc

SEQ ID NO: 1693 - RNA, 19 nt, synthetic construct
  source 1..19: mol_type = other RNA
aatgcttgacacgatgaac

SEQ ID NO: 1694 - RNA, 19 nt, synthetic construct
  source 1..19: mol_type = other RNA
ttagctaaaaatgcttgac

SEQ ID NO: 1695 - RNA, 19 nt, synthetic construct
  source 1..19: mol_type = other RNA
aaattcatctaaattagct

SEQ ID NO: 1696 - RNA, 19 nt, synthetic construct
  source 1..19: mol_type = other RNA
atcttcggcaaattcatct

SEQ ID NO: 1697 - RNA, 19 nt, synthetic construct
  source 1..19: mol_type = other RNA
tttaaaaagatatcttcgg

SEQ ID NO: 1698 - RNA, 19 nt, synthetic construct
  source 1..19: mol_type = other RNA
ttagcatccatttaaaaag

SEQ ID NO: 1699 - RNA, 19 nt, synthetic construct
  source 1..19: mol_type = other RNA
ttcaggaattttagcatcc

SEQ ID NO: 1700 - RNA, 19 nt, synthetic construct
  source 1..19: mol_type = other RNA
ctgaacttcaggaatttta

SEQ ID NO: 1701 - RNA, 19 nt, synthetic construct
  source 1..19: mol_type = other RNA
aactgtatgcagctgaact

SEQ ID NO: 1702 - RNA, 19 nt, synthetic construct
  source 1..19: mol_type = other RNA
ataagtgcaaactgtatgc

SEQ ID NO: 1703 - RNA, 19 nt, synthetic construct
  source 1..19: mol_type = other RNA
acaacaggagtccataagt

SEQ ID NO: 1704 - RNA, 19 nt, synthetic construct
  source 1..19: mol_type = other RNA
acttcaacaacaggagtcc

SEQ ID NO: 1705 - RNA, 19 nt, synthetic construct
  source 1..19: mol_type = other RNA
aaaaaaacgaacttcaaca

SEQ ID NO: 1706 - RNA, 19 nt, synthetic construct
  source 1..19: mol_type = other RNA
aaaagaagaaaacaaaaaa

SEQ ID NO: 1707 - RNA, 19 nt, synthetic construct
  source 1..19: mol_type = other RNA
aatgtttaaaaaaagaaga

SEQ ID NO: 1708 - RNA, 19 nt, synthetic construct
  source 1..19: mol_type = other RNA
agctatgaatgtttaaaaa

SEQ ID NO: 1709 - RNA, 19 nt, synthetic construct
  source 1..19: mol_type = other RNA
tacaaataagaccagctat

SEQ ID NO: 1710 - RNA, 19 nt, synthetic construct
  source 1..19: mol_type = other RNA
tgagctttacaaataagac

SEQ ID NO: 1711 - RNA, 19 nt, synthetic construct
  source 1..19: mol_type = other RNA
tctaagtaaagtgagcttt

SEQ ID NO: 1712 - RNA, 19 nt, synthetic construct
  source 1..19: mol_type = other RNA
agtgccactaattctaagt

SEQ ID NO: 1713 - RNA, 19 nt, synthetic construct
  source 1..19: mol_type = other RNA
aataaaagcaagtgccact

SEQ ID NO: 1714 - RNA, 19 nt, synthetic construct
  source 1..19: mol_type = other RNA
atcattctctaataaaagc

SEQ ID NO: 1715 - RNA, 19 nt, synthetic construct
  source 1..19: mol_type = other RNA
agcatttgaaatcattctc

SEQ ID NO: 1716 - RNA, 19 nt, synthetic construct
  source 1..19: mol_type = other RNA
aaagttacagcatttgaaa

SEQ ID NO: 1717 - RNA, 19 nt, synthetic construct
  source 1..19: mol_type = other RNA
tgttatttcagaaagttac

SEQ ID NO: 1718 - RNA, 19 nt, synthetic construct
  source 1..19: mol_type = other RNA
tccaaggccatgttatttc

SEQ ID NO: 1719 - RNA, 19 nt, synthetic construct
  source 1..19: mol_type = other RNA
gtcttcatgccctccaagg

SEQ ID NO: 1720 - RNA, 19 nt, synthetic construct
  source 1..19: mol_type = other RNA
gtatctgtcttcatgccct

SEQ ID NO: 1721 - RNA, 19 nt, synthetic construct
  source 1..19: mol_type = other RNA
ataaccttggaggagtatc

SEQ ID NO: 1722 - RNA, 19 nt, synthetic construct
  source 1..19: mol_type = other RNA
tgtccaataaccttggagg

SEQ ID NO: 1723 - RNA, 19 nt, synthetic construct
  source 1..19: mol_type = other RNA
tttattgtttccggtgtcc

SEQ ID NO: 1724 - RNA, 19 nt, synthetic construct
  source 1..19: mol_type = other RNA
tgttccaatttattgtttc

SEQ ID NO: 1725 - RNA, 19 nt, synthetic construct
  source 1..19: mol_type = other RNA
tttgaggaggtgttccaat

SEQ ID NO: 1726 - RNA, 19 nt, synthetic construct
  source 1..19: mol_type = other RNA
tgagtggtaggtttgagga

SEQ ID NO: 1727 - RNA, 19 nt, synthetic construct
  source 1..19: mol_type = other RNA
aaacattcctgagtggtag

SEQ ID NO: 1728 - RNA, 19 nt, synthetic construct
  source 1..19: mol_type = other RNA
ttcggccccagcaaacatt

SEQ ID NO: 1729 - RNA, 19 nt, synthetic construct
  source 1..19: mol_type = other RNA
tgttctttcggccccagca

SEQ ID NO: 1730 - RNA, 19 nt, synthetic construct
  source 1..19: mol_type = other RNA
tttcaatggactgttcttt

SEQ ID NO: 1731 - RNA, 19 nt, synthetic construct
  source 1..19: mol_type = other RNA
gtaatactccctttcaatg

SEQ ID NO: 1732 - RNA, 19 nt, synthetic construct
  source 1..19: mol_type = other RNA
catgtttttgtaatactcc

SEQ ID NO: 1733 - RNA, 19 nt, synthetic construct
  source 1..19: mol_type = other RNA
caagcaaaggccatgtttt

SEQ ID NO: 1734 - RNA, 19 nt, synthetic construct
  source 1..19: mol_type = other RNA
ttttctttcaagcaaaggc

SEQ ID NO: 1735 - RNA, 19 nt, synthetic construct
  source 1..19: mol_type = other RNA
ttccttggtattttctttc

SEQ ID NO: 1736 - RNA, 19 nt, synthetic construct
  source 1..19: mol_type = other RNA
tcagtttcctgttccttgg

SEQ ID NO: 1737 - RNA, 19 nt, synthetic construct
  source 1..19: mol_type = other RNA
caggctttaatgatcagtt

SEQ ID NO: 1738 - RNA, 19 nt, synthetic construct
  source 1..19: mol_type = other RNA
agcaaactcaggctttaat

SEQ ID NO: 1739 - DNA, 21 bp, synthetic construct
  source 1..21: mol_type = other DNA
  modified_base 1: mod_base = OTHER; note = uridine-3'-phosphate
  modified_base 2: mod_base = OTHER; note = adenosine-3'-phosphate
  modified_base 3: mod_base = OTHER; note = uridine-3'-phosphate
  modified_base 4: mod_base = OTHER; note = cytidine-3'-phosphate
  modified_base 5: mod_base = OTHER; note = cytidine-3'-phosphate
  modified_base 6: mod_base = OTHER; note = guanosine-3'-phosphate
  modified_base 7: mod_base = OTHER; note = uridine-3'-phosphate
  modified_base 8: mod_base = OTHER; note = guanosine-3'-phosphate
  modified_base 9: mod_base = OTHER; note = guanosine-3'-phosphate
  modified_base 10: mod_base = OTHER; note = uridine-3'-phosphate
  modified_base 11: mod_base = OTHER; note = uridine-3'-phosphate
  modified_base 12: mod_base = OTHER; note = uridine-3'-phosphate
  modified_base 13: mod_base = OTHER; note = cytidine-3'-phosphate
  modified_base 14: mod_base = OTHER; note = cytidine-3'-phosphate
  modified_base 15: mod_base = OTHER; note = uridine-3'-phosphate
  modified_base 16: mod_base = OTHER; note = guanosine-3'-phosphate
  modified_base 17: mod_base = OTHER; note = cytidine-3'-phosphate
  modified_base 18: mod_base = OTHER; note = uridine-3'-phosphate
  modified_base 19: mod_base = OTHER; note = adenosine-3'-phosphate
  misc_feature 1..19: note = RNA
  misc_feature 20..21: note = DNA
tatccgtggtttcctgctatt

SEQ ID NO: 1740 - DNA, 21 bp, synthetic construct
  source 1..21: mol_type = other DNA
  modified_base 1: mod_base = OTHER; note = guanosine-3'-phosphate
  modified_base 2: mod_base = OTHER; note = guanosine-3'-phosphate
  modified_base 3: mod_base = OTHER; note = uridine-3'-phosphate
  modified_base 4: mod_base = OTHER; note = uridine-3'-phosphate
  modified_base 5: mod_base = OTHER; note = uridine-3'-phosphate
  modified_base 6: mod_base = OTHER; note = cytidine-3'-phosphate
  modified_base 7: mod_base = OTHER; note = cytidine-3'-phosphate
  modified_base 8: mod_base = OTHER; note = uridine-3'-phosphate
  modified_base 9: mod_base = OTHER; note = guanosine-3'-phosphate
  modified_base 10: mod_base = OTHER; note = cytidine-3'-phosphate
  modified_base 11: mod_base = OTHER; note = uridine-3'-phosphate
  modified_base 12: mod_base = OTHER; note = adenosine-3'-phosphate
  modified_base 13: mod_base = OTHER; note = cytidine-3'-phosphate
  modified_base 14: mod_base = OTHER; note = cytidine-3'-phosphate
  modified_base 15: mod_base = OTHER; note = uridine-3'-phosphate
  modified_base 16: mod_base = OTHER; note = cytidine-3'-phosphate
  modified_base 17: mod_base = OTHER; note = cytidine-3'-phosphate
  modified_base 18: mod_base = OTHER; note = adenosine-3'-phosphate
  modified_base 19: mod_base = OTHER; note = adenosine-3'-phosphate
  misc_feature 1..19: note = RNA
  misc_feature 20..21: note = DNA
ggtttcctgctacctccaatt

SEQ ID NO: 1741 - DNA, 21 bp, synthetic construct
  source 1..21: mol_type = other DNA
  modified_base 1: mod_base = OTHER; note = cytidine-3'-phosphate
  modified_base 2: mod_base = OTHER; note = cytidine-3'-phosphate
  modified_base 3: mod_base = OTHER; note = uridine-3'-phosphate
  modified_base 4: mod_base = OTHER; note = cytidine-3'-phosphate
  modified_base 5: mod_base = OTHER; note = cytidine-3'-phosphate
  modified_base 6: mod_base = OTHER; note = adenosine-3'-phosphate
  modified_base 7: mod_base = OTHER; note = adenosine-3'-phosphate
  modified_base 8: mod_base = OTHER; note = cytidine-3'-phosphate
  modified_base 9: mod_base = OTHER; note = cytidine-3'-phosphate
  modified_base 10: mod_base = OTHER; note = adenosine-3'-phosphate
  modified_base 11: mod_base = OTHER; note = uridine-3'-phosphate
  modified_base 12: mod_base = OTHER; note = guanosine-3'-phosphate
  modified_base 13: mod_base = OTHER; note = guanosine-3'-phosphate
  modified_base 14: mod_base = OTHER; note = guanosine-3'-phosphate
  modified_base 15: mod_base = OTHER; note = cytidine-3'-phosphate
  modified_base 16: mod_base = OTHER; note = cytidine-3'-phosphate
  modified_base 17: mod_base = OTHER; note = uridine-3'-phosphate
  modified_base 18: mod_base = OTHER; note = uridine-3'-phosphate
  modified_base 19: mod_base = OTHER; note = uridine-3'-phosphate
  misc_feature 1..19: note = RNA
  misc_feature 20..21: note = DNA
cctccaaccatgggccttttt

SEQ ID NO: 1742 - DNA, 21 bp, synthetic construct
  source 1..21: mol_type = other DNA
  modified_base 1: mod_base = OTHER; note = guanosine-3'-phosphate
  modified_base 2: mod_base = OTHER; note = guanosine-3'-phosphate
  modified_base 3: mod_base = OTHER; note = guanosine-3'-phosphate
  modified_base 4: mod_base = OTHER; note = cytidine-3'-phosphate
  modified_base 5: mod_base = OTHER; note = cytidine-3'-phosphate
  modified_base 6: mod_base = OTHER; note = uridine-3'-phosphate
  modified_base 7: mod_base = OTHER; note = uridine-3'-phosphate
  modified_base 8: mod_base = OTHER; note = uridine-3'-phosphate
  modified_base 9: mod_base = OTHER; note = uridine-3'-phosphate
  modified_base 10: mod_base = OTHER; note = guanosine-3'-phosphate
  modified_base 11: mod_base = OTHER; note = guanosine-3'-phosphate
  modified_base 12: mod_base = OTHER; note = guanosine-3'-phosphate
  modified_base 13: mod_base = OTHER; note = adenosine-3'-phosphate
  modified_base 14: mod_base = OTHER; note = adenosine-3'-phosphate
  modified_base 15: mod_base = OTHER; note = uridine-3'-phosphate
  modified_base 16: mod_base = OTHER; note = adenosine-3'-phosphate
  modified_base 17: mod_base = OTHER; note = cytidine-3'-phosphate
  modified_base 18: mod_base = OTHER; note = uridine-3'-phosphate
  modified_base 19: mod_base = OTHER; note = uridine-3'-phosphate
  misc_feature 1..19: note = RNA
  misc_feature 20..21: note = DNA
gggccttttgggaatactttt

SEQ ID NO: 1743 - DNA, 21 bp, synthetic construct
  source 1..21: mol_type = other DNA
  modified_base 1: mod_base = OTHER; note = guanosine-3'-phosphate
  modified_base 2: mod_base = OTHER; note = guanosine-3'-phosphate
  modified_base 3: mod_base = OTHER; note = adenosine-3'-phosphate
  modified_base 4: mod_base = OTHER; note = adenosine-3'-phosphate
  modified_base 5: mod_base = OTHER; note = uridine-3'-phosphate
  modified_base 6: mod_base = OTHER; note = adenosine-3'-phosphate
  modified_base 7: mod_base = OTHER; note = cytidine-3'-phosphate
  modified_base 8: mod_base = OTHER; note = uridine-3'-phosphate
  modified_base 9: mod_base = OTHER; note = uridine-3'-phosphate
  modified_base 10: mod_base = OTHER; note = uridine-3'-phosphate
  modified_base 11: mod_base = OTHER; note = guanosine-3'-phosphate
  modified_base 12: mod_base = OTHER; note = uridine-3'-phosphate
  modified_base 13: mod_base = OTHER; note = uridine-3'-phosphate
  modified_base 14: mod_base = OTHER; note = uridine-3'-phosphate
  modified_base 15: mod_base = OTHER; note = uridine-3'-phosphate
  modified_base 16: mod_base = OTHER; note = uridine-3'-phosphate
  modified_base 17: mod_base = OTHER; note = uridine-3'-phosphate
  modified_base 18: mod_base = OTHER; note = adenosine-3'-phosphate
  modified_base 19: mod_base = OTHER; note = adenosine-3'-phosphate
  misc_feature 1..19: note = RNA
  misc_feature 20..21: note = DNA
ggaatactttgttttttaatt

SEQ ID NO: 1744 - DNA, 21 bp, synthetic construct
  source 1..21: mol_type = other DNA
  modified_base 1: mod_base = OTHER; note = cytidine-3'-phosphate
  modified_base 2: mod_base = OTHER; note = uridine-3'-phosphate
  modified_base 3: mod_base = OTHER; note = uridine-3'-phosphate
  modified_base 4: mod_base = OTHER; note = uridine-3'-phosphate
  modified_base 5: mod_base = OTHER; note = guanosine-3'-phosphate
  modified_base 6: mod_base = OTHER; note = uridine-3'-phosphate
  modified_base 7: mod_base = OTHER; note = uridine-3'-phosphate
  modified_base 8: mod_base = OTHER; note = uridine-3'-phosphate
  modified_base 9: mod_base = OTHER; note = uridine-3'-phosphate
  modified_base 10: mod_base = OTHER; note = uridine-3'-phosphate
  modified_base 11: mod_base = OTHER; note = uridine-3'-phosphate
  modified_base 12: mod_base = OTHER; note = adenosine-3'-phosphate
  modified_base 13: mod_base = OTHER; note = adenosine-3'-phosphate
  modified_base 14: mod_base = OTHER; note = uridine-3'-phosphate
  modified_base 15: mod_base = OTHER; note = cytidine-3'-phosphate
  modified_base 16: mod_base = OTHER; note = uridine-3'-phosphate
  modified_base 17: mod_base = OTHER; note = uridine-3'-phosphate
  modified_base 18: mod_base = OTHER; note = cytidine-3'-phosphate
  modified_base 19: mod_base = OTHER; note = cytidine-3'-phosphate
  misc_feature 1..19: note = RNA
  misc_feature 20..21: note = DNA
ctttgttttttaatcttcctt

SEQ ID NO: 1745 - DNA, 21 bp, synthetic construct
  source 1..21: mol_type = other DNA
  modified_base 1: mod_base = OTHER; note = cytidine-3'-phosphate
  modified_base 2: mod_base = OTHER; note = uridine-3'-phosphate
  modified_base 3: mod_base = OTHER; note = uridine-3'-phosphate
  modified_base 4: mod_base = OTHER; note = cytidine-3'-phosphate
  modified_base 5: mod_base = OTHER; note = cytidine-3'-phosphate
  modified_base 6: mod_base = OTHER; note = uridine-3'-phosphate
  modified_base 7: mod_base = OTHER; note = guanosine-3'-phosphate
  modified_base 8: mod_base = OTHER; note = guanosine-3'-phosphate
  modified_base 9: mod_base = OTHER; note = guanosine-3'-phosphate
  modified_base 10: mod_base = OTHER; note = guanosine-3'-phosphate
  modified_base 11: mod_base = OTHER; note = adenosine-3'-phosphate
  modified_base 12: mod_base = OTHER; note = adenosine-3'-phosphate
  modified_base 13: mod_base = OTHER; note = adenosine-3'-phosphate
  modified_base 14: mod_base = OTHER; note = adenosine-3'-phosphate
  modified_base 15: mod_base = OTHER; note = cytidine-3'-phosphate
  modified_base 16: mod_base = OTHER; note = cytidine-3'-phosphate
  modified_base 17: mod_base = OTHER; note = uridine-3'-phosphate
  modified_base 18: mod_base = OTHER; note = guanosine-3'-phosphate
  modified_base 19: mod_base = OTHER; note = guanosine-3'-phosphate
  misc_feature 1..19: note = RNA
  misc_feature 20..21: note = DNA
cttcctggggaaaacctggtt

SEQ ID NO: 1746 - DNA, 21 bp, synthetic construct
  source 1..21: mol_type = other DNA
  modified_base 1: mod_base = OTHER; note = guanosine-3'-phosphate
  modified_base 2: mod_base = OTHER; note = guanosine-3'-phosphate
  modified_base 3: mod_base = OTHER; note = adenosine-3'-phosphate
  modified_base 4: mod_base = OTHER; note = adenosine-3'-phosphate
  modified_base 5: mod_base = OTHER; note = adenosine-3'-phosphate
  modified_base 6: mod_base = OTHER; note = adenosine-3'-phosphate
  modified_base 7: mod_base = OTHER; note = cytidine-3'-phosphate
  modified_base 8: mod_base = OTHER; note = cytidine-3'-phosphate
  modified_base 9: mod_base = OTHER; note = uridine-3'-phosphate
  modified_base 10: mod_base = OTHER; note = guanosine-3'-phosphate
  modified_base 11: mod_base = OTHER; note = guanosine-3'-phosphate
  modified_base 12: mod_base = OTHER; note = guanosine-3'-phosphate
  modified_base 13: mod_base = OTHER; note = guanosine-3'-phosphate
  modified_base 14: mod_base = OTHER; note = adenosine-3'-phosphate
  modified_base 15: mod_base = OTHER; note = cytidine-3'-phosphate
  modified_base 16: mod_base = OTHER; note = adenosine-3'-phosphate
  modified_base 17: mod_base = OTHER; note = guanosine-3'-phosphate
  modified_base 18: mod_base = OTHER; note = guanosine-3'-phosphate
  modified_base 19: mod_base = OTHER; note = adenosine-3'-phosphate
  misc_feature 1..19: note = RNA
  misc_feature 20..21: note = DNA
ggaaaacctggggacaggatt

SEQ ID NO: 1747 - DNA, 21 bp, synthetic construct
  source 1..21: mol_type = other DNA
  modified_base 1: mod_base = OTHER; note = guanosine-3'-phosphate
  modified_base 2: mod_base = OTHER; note = guanosine-3'-phosphate
  modified_base 3: mod_base = OTHER; note = guanosine-3'-phosphate
  modified_base 4: mod_base = OTHER; note = adenosine-3'-phosphate
  modified_base 5: mod_base = OTHER; note = cytidine-3'-phosphate
  modified_base 6: mod_base = OTHER; note = adenosine-3'-phosphate
  modified_base 7: mod_base = OTHER; note = guanosine-3'-phosphate
  modified_base 8: mod_base = OTHER; note = guanosine-3'-phosphate
  modified_base 9: mod_base = OTHER; note = adenosine-3'-phosphate
  modified_base 10: mod_base = OTHER; note = guanosine-3'-phosphate
  modified_base 11: mod_base = OTHER; note = cytidine-3'-phosphate
  modified_base 12: mod_base = OTHER; note = adenosine-3'-phosphate
  modified_base 13: mod_base = OTHER; note = adenosine-3'-phosphate
  modified_base 14: mod_base = OTHER; note = adenosine-3'-phosphate
  modified_base 15: mod_base = OTHER; note = cytidine-3'-phosphate
  modified_base 16: mod_base = OTHER; note = adenosine-3'-phosphate
  modified_base 17: mod_base = OTHER; note = uridine-3'-phosphate
  modified_base 18: mod_base = OTHER; note = adenosine-3'-phosphate
  modified_base 19: mod_base = OTHER; note = uridine-3'-phosphate
  misc_feature 1..19: note = RNA
  misc_feature 20..21: note = DNA
gggacaggagcaaacatattt

SEQ ID NO: 1748 - DNA, 21 bp, synthetic construct
  source 1..21: mol_type = other DNA
  modified_base 1: mod_base = OTHER; note = cytidine-3'-phosphate
  modified_base 2: mod_base = OTHER; note = adenosine-3'-phosphate
  modified_base 3: mod_base = OTHER; note = adenosine-3'-phosphate
  modified_base 4: mod_base = OTHER; note = adenosine-3'-phosphate
  modified_base 5: mod_base = OTHER; note = cytidine-3'-phosphate
  modified_base 6: mod_base = OTHER; note = adenosine-3'-phosphate
  modified_base 7: mod_base = OTHER; note = uridine-3'-phosphate
  modified_base 8: mod_base = OTHER; note = adenosine-3'-phosphate
  modified_base 9: mod_base = OTHER; note = uridine-3'-phosphate
  modified_base 10: mod_base = OTHER; note = guanosine-3'-phosphate
  modified_base 11: mod_base = OTHER; note = uridine-3'-phosphate
  modified_base 12: mod_base = OTHER; note = cytidine-3'-phosphate
  modified_base 13: mod_base = OTHER; note = adenosine-3'-phosphate
  modified_base 14: mod_base = OTHER; note = uridine-3'-phosphate
  modified_base 15: mod_base = OTHER; note = uridine-3'-phosphate
  modified_base 16: mod_base = OTHER; note = uridine-3'-phosphate
  modified_base 17: mod_base = OTHER; note = cytidine-3'-phosphate
  modified_base 18: mod_base = OTHER; note = adenosine-3'-phosphate
  modified_base 19: mod_base = OTHER; note = guanosine-3'-phosphate
  misc_feature 1..19: note = RNA
  misc_feature 20..21: note = DNA
caaacatatgtcatttcagtt

SEQ ID NO: 1749 - DNA, 21 bp, synthetic construct
  source 1..21: mol_type = other DNA
  modified_base 1: mod_base = OTHER; note = cytidine-3'-phosphate
  modified_base 2: mod_base = OTHER; note = adenosine-3'-phosphate
  modified_base 3: mod_base = OTHER; note = uridine-3'-phosphate
  modified_base 4: mod_base = OTHER; note = uridine-3'-phosphate
  modified_base 5: mod_base = OTHER; note = uridine-3'-phosphate
  modified_base 6: mod_base = OTHER; note = cytidine-3'-phosphate
  modified_base 7: mod_base = OTHER; note = adenosine-3'-phosphate
  modified_base 8: mod_base = OTHER; note = guanosine-3'-phosphate
  modified_base 9: mod_base = OTHER; note = cytidine-3'-phosphate
  modified_base 10: mod_base = OTHER; note = adenosine-3'-phosphate
  modified_base 11: mod_base = OTHER; note = cytidine-3'-phosphate
  modified_base 12: mod_base = OTHER; note = cytidine-3'-phosphate
  modified_base 13: mod_base = OTHER; note = adenosine-3'-phosphate
  modified_base 14: mod_base = OTHER; note = adenosine-3'-phosphate
  modified_base 15: mod_base = OTHER; note = adenosine-3'-phosphate
  modified_base 16: mod_base = OTHER; note = adenosine-3'-phosphate
  modified_base 17: mod_base = OTHER; note = adenosine-3'-phosphate
  modified_base 18: mod_base = OTHER; note = uridine-3'-phosphate
  modified_base 19: mod_base = OTHER; note = adenosine-3'-phosphate
  misc_feature 1..19: note = RNA
  misc_feature 20..21: note = DNA
catttcagcaccaaaaatatt

SEQ ID NO: 1750 - DNA, 21 bp, synthetic construct
  source 1..21: mol_type = other DNA
  modified_base 1: mod_base = OTHER; note = guanosine-3'-phosphate
  modified_base 2: mod_base = OTHER; note = cytidine-3'-phosphate
  modified_base 3: mod_base = OTHER; note = adenosine-3'-phosphate
  modified_base 4: mod_base = OTHER; note = cytidine-3'-phosphate
  modified_base 5: mod_base = OTHER; note = cytidine-3'-phosphate
  modified_base 6: mod_base = OTHER; note = adenosine-3'-phosphate
  modified_base 7: mod_base = OTHER; note = adenosine-3'-phosphate
  modified_base 8: mod_base = OTHER; note = adenosine-3'-phosphate
  modified_base 9: mod_base = OTHER; note = adenosine-3'-phosphate
  modified_base 10: mod_base = OTHER; note = adenosine-3'-phosphate
  modified_base 11: mod_base = OTHER; note = uridine-3'-phosphate
  modified_base 12: mod_base = OTHER; note = adenosine-3'-phosphate
  modified_base 13: mod_base = OTHER; note = uridine-3'-phosphate
  modified_base 14: mod_base = OTHER; note = uridine-3'-phosphate
  modified_base 15: mod_base = OTHER; note = cytidine-3'-phosphate
  modified_base 16: mod_base = OTHER; note = cytidine-3'-phosphate
  modified_base 17: mod_base = OTHER; note = guanosine-3'-phosphate
  modified_base 18: mod_base = OTHER; note = uridine-3'-phosphate
  modified_base 19: mod_base = OTHER; note = guanosine-3'-phosphate
  misc_feature 1..19: note = RNA
  misc_feature 20..21: note = DNA
gcaccaaaaatattccgtgtt

SEQ ID NO: 1751 - DNA, 21 bp, synthetic construct
  source 1..21: mol_type = other DNA
  modified_base 1: mod_base = OTHER; note = cytidine-3'-phosphate
  modified_base 2: mod_base = OTHER; note = cytidine-3'-phosphate
  modified_base 3: mod_base = OTHER; note = guanosine-3'-phosphate
  modified_base 4: mod_base = OTHER; note = uridine-3'-phosphate
  modified_base 5: mod_base = OTHER; note = guanosine-3'-phosphate
  modified_base 6: mod_base = OTHER; note = uridine-3'-phosphate
  modified_base 7: mod_base = OTHER; note = uridine-3'-phosphate
  modified_base 8: mod_base = OTHER; note = guanosine-3'-phosphate
  modified_base 9: mod_base = OTHER; note = guanosine-3'-phosphate
  modified_base 10: mod_base = OTHER; note = adenosine-3'-phosphate
  modified_base 11: mod_base = OTHER; note = guanosine-3'-phosphate
  modified_base 12: mod_base = OTHER; note = cytidine-3'-phosphate
  modified_base 13: mod_base = OTHER; note = adenosine-3'-phosphate
  modified_base 14: mod_base = OTHER; note = uridine-3'-phosphate
  modified_base 15: mod_base = OTHER; note = cytidine-3'-phosphate
  modified_base 16: mod_base = OTHER; note = uridine-3'-phosphate
  modified_base 17: mod_base = OTHER; note = guanosine-3'-phosphate
  modified_base 18: mod_base = OTHER; note = adenosine-3'-phosphate
  modified_base 19: mod_base = OTHER; note = adenosine-3'-phosphate
  misc_feature 1..19: note = RNA
  misc_feature 20..21: note = DNA
ccgtgttggagcatctgaatt

SEQ ID NO: 1752 - DNA, 21 bp, synthetic construct
  source 1..21: mol_type = other DNA
  modified_base 1: mod_base = OTHER; note = guanosine-3'-phosphate
  modified_base 2: mod_base = OTHER; note = guanosine-3'-phosphate
  modified_base 3: mod_base = OTHER; note = adenosine-3'-phosphate
  modified_base 4: mod_base = OTHER; note = guanosine-3'-phosphate
  modified_base 5: mod_base = OTHER; note = cytidine-3'-phosphate
  modified_base 6: mod_base = OTHER; note = adenosine-3'-phosphate
  modified_base 7: mod_base = OTHER; note = uridine-3'-phosphate
  modified_base 8: mod_base = OTHER; note = cytidine-3'-phosphate
  modified_base 9: mod_base = OTHER; note = uridine-3'-phosphate
  modified_base 10: mod_base = OTHER; note = guanosine-3'-phosphate
  modified_base 11: mod_base = OTHER; note = adenosine-3'-phosphate
  modified_base 12: mod_base = OTHER; note = adenosine-3'-phosphate
  modified_base 13: mod_base = OTHER; note = adenosine-3'-phosphate
  modified_base 14: mod_base = OTHER; note = adenosine-3'-phosphate
  modified_base 15: mod_base = OTHER; note = uridine-3'-phosphate
  modified_base 16: mod_base = OTHER; note = adenosine-3'-phosphate
  modified_base 17: mod_base = OTHER; note = uridine-3'-phosphate
  modified_base 18: mod_base = OTHER; note = uridine-3'-phosphate
  modified_base 19: mod_base = OTHER; note = guanosine-3'-phosphate
  misc_feature 1..19: note = RNA
  misc_feature 20..21: note = DNA
ggagcatctgaaaatattgtt

SEQ ID NO: 1753 - DNA, 21 bp, synthetic construct
  source 1..21: mol_type = other DNA
  modified_base 1: mod_base = OTHER; note = guanosine-3'-phosphate
  modified_base 2: mod_base = OTHER; note = adenosine-3'-phosphate
  modified_base 3: mod_base = OTHER; note = adenosine-3'-phosphate
  modified_base 4: mod_base = OTHER; note = adenosine-3'-phosphate
  modified_base 5: mod_base = OTHER; note = adenosine-3'-phosphate
  modified_base 6: mod_base = OTHER; note = uridine-3'-phosphate
  modified_base 7: mod_base = OTHER; note = adenosine-3'-phosphate
  modified_base 8: mod_base = OTHER; note = uridine-3'-phosphate
  modified_base 9: mod_base = OTHER; note = uridine-3'-phosphate
  modified_base 10: mod_base = OTHER; note = guanosine-3'-phosphate
  modified_base 11: mod_base = OTHER; note = uridine-3'-phosphate
  modified_base 12: mod_base = OTHER; note = guanosine-3'-phosphate
  modified_base 13: mod_base = OTHER; note = adenosine-3'-phosphate
  modified_base 14: mod_base = OTHER; note = uridine-3'-phosphate
  modified_base 15: mod_base = OTHER; note = uridine-3'-phosphate
  modified_base 16: mod_base = OTHER; note = cytidine-3'-phosphate
  modified_base 17: mod_base = OTHER; note = adenosine-3'-phosphate
  modified_base 18: mod_base = OTHER; note = adenosine-3'-phosphate
  modified_base 19: mod_base = OTHER; note = guanosine-3'-phosphate
  misc_feature 1..19: note = RNA
  misc_feature 20..21: note = DNA
gaaaatattgtgattcaagtt

SEQ ID NO: 1754 - DNA, 21 bp, synthetic construct
  source 1..21: mol_type = other DNA
  modified_base 1: mod_base = OTHER; note = guanosine-3'-phosphate
  modified_base 2: mod_base = OTHER; note = adenosine-3'-phosphate
  modified_base 3: mod_base = OTHER; note = uridine-3'-phosphate
  modified_base 4: mod_base = OTHER; note = uridine-3'-phosphate
  modified_base 5: mod_base = OTHER; note = cytidine-3'-phosphate
  modified_base 6: mod_base = OTHER; note = adenosine-3'-phosphate
  modified_base 7: mod_base = OTHER; note = adenosine-3'-phosphate
  modified_base 8: mod_base = OTHER; note = guanosine-3'-phosphate
  modified_base 9: mod_base = OTHER; note = uridine-3'-phosphate
  modified_base 10: mod_base = OTHER; note = uridine-3'-phosphate
  modified_base 11: mod_base = OTHER; note = uridine-3'-phosphate
  modified_base 12: mod_base = OTHER; note = adenosine-3'-phosphate
  modified_base 13: mod_base = OTHER; note = uridine-3'-phosphate
  modified_base 14: mod_base = OTHER; note = guanosine-3'-phosphate
  modified_base 15: mod_base = OTHER; note = guanosine-3'-phosphate
  modified_base 16: mod_base = OTHER; note = adenosine-3'-phosphate
  modified_base 17: mod_base = OTHER; note = uridine-3'-phosphate
  modified_base 18: mod_base = OTHER; note = adenosine-3'-phosphate
  modified_base 19: mod_base = OTHER; note = cytidine-3'-phosphate
  misc_feature 1..19: note = RNA
  misc_feature 20..21: note = DNA
gattcaagtttatggatactt

SEQ ID NO: 1755 - DNA, 21 bp, synthetic construct
  source 1..21: mol_type = other DNA
  modified_base 1: mod_base = OTHER; note = guanosine-3'-phosphate
  modified_base 2: mod_base = OTHER; note = guanosine-3'-phosphate
  modified_base 3: mod_base = OTHER; note = adenosine-3'-phosphate
  modified_base 4: mod_base = OTHER; note = uridine-3'-phosphate
  modified_base 5: mod_base = OTHER; note = adenosine-3'-phosphate
  modified_base 6: mod_base = OTHER; note = cytidine-3'-phosphate
  modified_base 7: mod_base = OTHER; note = adenosine-3'-phosphate
  modified_base 8: mod_base = OTHER; note = cytidine-3'-phosphate
  modified_base 9: mod_base = OTHER; note = uridine-3'-phosphate
  modified_base 10: mod_base = OTHER; note = guanosine-3'-phosphate
  modified_base 11: mod_base = OTHER; note = adenosine-3'-phosphate
  modified_base 12: mod_base = OTHER; note = adenosine-3'-phosphate
  modified_base 13: mod_base = OTHER; note = guanosine-3'-phosphate
  modified_base 14: mod_base = OTHER; note = cytidine-3'-phosphate
  modified_base 15: mod_base = OTHER; note = adenosine-3'-phosphate
  modified_base 16: mod_base = OTHER; note = uridine-3'-phosphate
  modified_base 17: mod_base = OTHER; note = uridine-3'-phosphate
  modified_base 18: mod_base = OTHER; note = uridine-3'-phosphate
  modified_base 19: mod_base = OTHER; note = guanosine-3'-phosphate
  misc_feature 1..19: note = RNA
  misc_feature 20..21: note = DNA
ggatacactgaagcatttgtt

SEQ ID NO: 1756 - DNA, 21 bp, synthetic construct
  source 1..21: mol_type = other DNA
  modified_base 1: mod_base = OTHER; note = guanosine-3'-phosphate
  modified_base 2: mod_base = OTHER; note = adenosine-3'-phosphate
  modified_base 3: mod_base = OTHER; note = adenosine-3'-phosphate
  modified_base 4: mod_base = OTHER; note = guanosine-3'-phosphate
  modified_base 5: mod_base = OTHER; note = cytidine-3'-phosphate
  modified_base 6: mod_base = OTHER; note = adenosine-3'-phosphate
  modified_base 7: mod_base = OTHER; note = uridine-3'-phosphate
  modified_base 8: mod_base = OTHER; note = uridine-3'-phosphate
  modified_base 9: mod_base = OTHER; note = uridine-3'-phosphate
  modified_base 10: mod_base = OTHER; note = guanosine-3'-phosphate
  modified_base 11: mod_base = OTHER; note = adenosine-3'-phosphate
  modified_base 12: mod_base = OTHER; note = uridine-3'-phosphate
  modified_base 13: mod_base = OTHER; note = guanosine-3'-phosphate
  modified_base 14: mod_base = OTHER; note = cytidine-3'-phosphate
  modified_base 15: mod_base = OTHER; note = adenosine-3'-phosphate
  modified_base 16: mod_base = OTHER; note = adenosine-3'-phosphate
  modified_base 17: mod_base = OTHER; note = cytidine-3'-phosphate
  modified_base 18: mod_base = OTHER; note = adenosine-3'-phosphate
  modified_base 19: mod_base = OTHER; note = adenosine-3'-phosphate
  misc_feature 1..19: note = RNA
  misc_feature 20..21: note = DNA
gaagcatttgatgcaacaatt

SEQ ID NO: 1757 - DNA, 21 bp, synthetic construct
  source 1..21: mol_type = other DNA
  modified_base 1: mod_base = OTHER; note = uridine-3'-phosphate
  modified_base 2: mod_base = OTHER; note = guanosine-3'-phosphate
  modified_base 3: mod_base = OTHER; note = cytidine-3'-phosphate
  modified_base 4: mod_base = OTHER; note = adenosine-3'-phosphate
  modified_base 5: mod_base = OTHER; note = adenosine-3'-phosphate
  modified_base 6: mod_base = OTHER; note = cytidine-3'-phosphate
  modified_base 7: mod_base = OTHER; note = adenosine-3'-phosphate
  modified_base 8: mod_base = OTHER; note = adenosine-3'-phosphate
  modified_base 9: mod_base = OTHER; note = uridine-3'-phosphate
  modified_base 10: mod_base = OTHER; note = cytidine-3'-phosphate
  modified_base 11: mod_base = OTHER; note = uridine-3'-phosphate
  modified_base 12: mod_base = OTHER; note = cytidine-3'-phosphate
  modified_base 13: mod_base = OTHER; note = uridine-3'-phosphate
  modified_base 14: mod_base = OTHER; note = adenosine-3'-phosphate
  modified_base 15: mod_base = OTHER; note = uridine-3'-phosphate
  modified_base 16: mod_base = OTHER; note = uridine-3'-phosphate
  modified_base 17: mod_base = OTHER; note = adenosine-3'-phosphate
  modified_base 18: mod_base = OTHER; note = adenosine-3'-phosphate
  modified_base 19: mod_base = OTHER; note = adenosine-3'-phosphate
  misc_feature 1..19: note = RNA
  misc_feature 20..21: note = DNA
tgcaacaatctctattaaatt

SEQ ID NO: 1758 - DNA, 21 bp, synthetic construct
  source 1..21: mol_type = other DNA
  modified_base 1: mod_base = OTHER; note = adenosine-3'-phosphate
  modified_base 2: mod_base = OTHER; note = adenosine-3'-phosphate
  modified_base 3: mod_base = OTHER; note = uridine-3'-phosphate
  modified_base 4: mod_base = OTHER; note = cytidine-3'-phosphate
  modified_base 5: mod_base = OTHER; note = uridine-3'-phosphate
  modified_base 6: mod_base = OTHER; note = cytidine-3'-phosphate
  modified_base 7: mod_base = OTHER; note = uridine-3'-phosphate
  modified_base 8: mod_base = OTHER; note = adenosine-3'-phosphate
  modified_base 9: mod_base = OTHER; note = uridine-3'-phosphate
  modified_base 10: mod_base = OTHER; note = uridine-3'-phosphate
  modified_base 11: mod_base = OTHER; note = adenosine-3'-phosphate
  modified_base 12: mod_base = OTHER; note = adenosine-3'-phosphate
  modified_base 13: mod_base = OTHER; note = adenosine-3'-phosphate
  modified_base 14: mod_base = OTHER; note = adenosine-3'-phosphate
  modified_base 15: mod_base = OTHER; note = guanosine-3'-phosphate
  modified_base 16: mod_base = OTHER; note = uridine-3'-phosphate
  modified_base 17: mod_base = OTHER; note = uridine-3'-phosphate
  modified_base 18: mod_base = OTHER; note = adenosine-3'-phosphate
  modified_base 19: mod_base = OTHER; note = uridine-3'-phosphate
  misc_feature 1..19: note = RNA
  misc_feature 20..21: note = DNA
aatctctattaaaagttattt

SEQ ID NO: 1759 - DNA, 21 bp, synthetic construct
  source 1..21: mol_type = other DNA
  modified_base 1: mod_base = OTHER; note = adenosine-3'-phosphate
  modified_base 2: mod_base = OTHER; note = adenosine-3'-phosphate
  modified_base 3: mod_base = OTHER; note = guanosine-3'-phosphate
  modified_base 4: mod_base = OTHER; note = uridine-3'-phosphate
  modified_base 5: mod_base = OTHER; note = uridine-3'-phosphate
  modified_base 6: mod_base = OTHER; note = adenosine-3'-phosphate
  modified_base 7: mod_base = OTHER; note = uridine-3'-phosphate
  modified_base 8: mod_base = OTHER; note = cytidine-3'-phosphate
  modified_base 9: mod_base = OTHER; note = cytidine-3'-phosphate
  modified_base 10: mod_base = OTHER; note = uridine-3'-phosphate
  modified_base 11: mod_base = OTHER; note = guanosine-3'-phosphate
  modified_base 12: mod_base = OTHER; note = adenosine-3'-phosphate
  modified_base 13: mod_base = OTHER; note = uridine-3'-phosphate
  modified_base 14: mod_base = OTHER; note = adenosine-3'-phosphate
  modified_base 15: mod_base = OTHER; note = adenosine-3'-phosphate
  modified_base 16: mod_base = OTHER; note = adenosine-3'-phosphate
  modified_base 17: mod_base = OTHER; note = adenosine-3'-phosphate
  modified_base 18: mod_base = OTHER; note = adenosine-3'-phosphate
  modified_base 19: mod_base = OTHER; note = adenosine-3'-phosphate
  misc_feature 1..19: note = RNA
  misc_feature 20..21: note = DNA
aagttatcctgataaaaaatt

SEQ ID NO: 1760 - DNA, 21 bp, synthetic construct
  source 1..21: mol_type = other DNA
  modified_base 1: mod_base = OTHER; note = cytidine-3'-phosphate
  modified_base 2: mod_base = OTHER; note = uridine-3'-phosphate
  modified_base 3: mod_base = OTHER; note = guanosine-3'-phosphate
  modified_base 4: mod_base = OTHER; note = adenosine-3'-phosphate
  modified_base 5: mod_base = OTHER; note = uridine-3'-phosphate
  modified_base 6: mod_base = OTHER; note = adenosine-3'-phosphate
  modified_base 7: mod_base = OTHER; note = adenosine-3'-phosphate
  modified_base 8: mod_base = OTHER; note = adenosine-3'-phosphate
  modified_base 9: mod_base = OTHER; note = adenosine-3'-phosphate
  modified_base 10: mod_base = OTHER; note = adenosine-3'-phosphate
  modified_base 11: mod_base = OTHER; note = adenosine-3'-phosphate
  modified_base 12: mod_base = OTHER; note = uridine-3'-phosphate
  modified_base 13: mod_base = OTHER; note = uridine-3'-phosphate
  modified_base 14: mod_base = OTHER; note = uridine-3'-phosphate
  modified_base 15: mod_base = OTHER; note = adenosine-3'-phosphate
  modified_base 16: mod_base = OTHER; note = guanosine-3'-phosphate
  modified_base 17: mod_base = OTHER; note = uridine-3'-phosphate
  modified_base 18: mod_base = OTHER; note = uridine-3'-phosphate
  modified_base 19: mod_base = OTHER; note = adenosine-3'-phosphate
  misc_feature 1..19: note = RNA
  misc_feature 20..21: note = DNA
ctgataaaaaatttagttatt

SEQ ID NO: 1761 - DNA, 21 bp, synthetic construct
  source 1..21: mol_type = other DNA
  modified_base 1: mod_base = OTHER; note = uridine-3'-phosphate
  modified_base 2: mod_base = OTHER; note = uridine-3'-phosphate
  modified_base 3: mod_base = OTHER; note = adenosine-3'-phosphate
  modified_base 4: mod_base = OTHER; note = guanosine-3'-phosphate
  modified_base 5: mod_base = OTHER; note = uridine-3'-phosphate
  modified_base 6: mod_base = OTHER; note = uridine-3'-phosphate
  modified_base 7: mod_base = OTHER; note = adenosine-3'-phosphate
  modified_base 8: mod_base = OTHER; note = cytidine-3'-phosphate
  modified_base 9: mod_base = OTHER; note = uridine-3'-phosphate
  modified_base 10: mod_base = OTHER; note = cytidine-3'-phosphate
  modified_base 11: mod_base = OTHER; note = cytidine-3'-phosphate
  modified_base 12: mod_base = OTHER; note = uridine-3'-phosphate
  modified_base 13: mod_base = OTHER; note = cytidine-3'-phosphate
  modified_base 14: mod_base = OTHER; note = adenosine-3'-phosphate
  modified_base 15: mod_base = OTHER; note = guanosine-3'-phosphate
  modified_base 16: mod_base = OTHER; note = guanosine-3'-phosphate
  modified_base 17: mod_base = OTHER; note = cytidine-3'-phosphate
  modified_base 18: mod_base = OTHER; note = cytidine-3'-phosphate
  modified_base 19: mod_base = OTHER; note = adenosine-3'-phosphate
  misc_feature 1..19: note = RNA
  misc_feature 20..21: note = DNA
ttagttactcctcaggccatt

SEQ ID NO: 1762 - DNA, 21 bp, synthetic construct
  source 1..21: mol_type = other DNA
  modified_base 1: mod_base = OTHER; note = cytidine-3'-phosphate
  modified_base 2: mod_base = OTHER; note = cytidine-3'-phosphate
  modified_base 3: mod_base = OTHER; note = uridine-3'-phosphate
  modified_base 4: mod_base = OTHER; note = cytidine-3'-phosphate
  modified_base 5: mod_base = OTHER; note = adenosine-3'-phosphate
  modified_base 6: mod_base = OTHER; note = guanosine-3'-phosphate
  modified_base 7: mod_base = OTHER; note = guanosine-3'-phosphate
  modified_base 8: mod_base = OTHER; note = cytidine-3'-phosphate
  modified_base 9: mod_base = OTHER; note = cytidine-3'-phosphate
  modified_base 10: mod_base = OTHER; note = adenosine-3'-phosphate
  modified_base 11: mod_base = OTHER; note = uridine-3'-phosphate
  modified_base 12: mod_base = OTHER; note = guanosine-3'-phosphate
  modified_base 13: mod_base = OTHER; note = uridine-3'-phosphate
  modified_base 14: mod_base = OTHER; note = uridine-3'-phosphate
  modified_base 15: mod_base = OTHER; note = cytidine-3'-phosphate
  modified_base 16: mod_base = OTHER; note = adenosine-3'-phosphate
  modified_base 17: mod_base = OTHER; note = uridine-3'-phosphate
  modified_base 18: mod_base = OTHER; note = uridine-3'-phosphate
  modified_base 19: mod_base = OTHER; note = uridine-3'-phosphate
  misc_feature 1..19: note = RNA
  misc_feature 20..21: note = DNA
cctcaggccatgttcattttt

SEQ ID NO: 1763 - DNA, 21 bp, synthetic construct
  source 1..21: mol_type = other DNA
  modified_base 1: mod_base = OTHER; note = uridine-3'-phosphate
  modified_base 2: mod_base = OTHER; note = uridine-3'-phosphate
  modified_base 3: mod_base = OTHER; note = cytidine-3'-phosphate
  modified_base 4: mod_base = OTHER; note = adenosine-3'-phosphate
  modified_base 5: mod_base = OTHER; note = uridine-3'-phosphate
  modified_base 6: mod_base = OTHER; note = uridine-3'-phosphate
  modified_base 7: mod_base = OTHER; note = uridine-3'-phosphate
  modified_base 8: mod_base = OTHER; note = adenosine-3'-phosphate
  modified_base 9: mod_base = OTHER; note = uridine-3'-phosphate
  modified_base 10: mod_base = OTHER; note = cytidine-3'-phosphate
  modified_base 11: mod_base = OTHER; note = cytidine-3'-phosphate
  modified_base 12: mod_base = OTHER; note = uridine-3'-phosphate
  modified_base 13: mod_base = OTHER; note = cytidine-3'-phosphate
  modified_base 14: mod_base = OTHER; note = adenosine-3'-phosphate
  modified_base 15: mod_base = OTHER; note = guanosine-3'-phosphate
  modified_base 16: mod_base = OTHER; note = adenosine-3'-phosphate
  modified_base 17: mod_base = OTHER; note = guanosine-3'-phosphate
  modified_base 18: mod_base = OTHER; note = adenosine-3'-phosphate
  modified_base 19: mod_base = OTHER; note = adenosine-3'-phosphate
  misc_feature 1..19: note = RNA
  misc_feature 20..21: note = DNA
ttcatttatcctcagagaatt

SEQ ID NO: 1764 - DNA, 21 bp, synthetic construct
  source 1..21: mol_type = other DNA
  modified_base 1: mod_base = OTHER; note = cytidine-3'-phosphate
  modified_base 2: mod_base = OTHER; note = uridine-3'-phosphate
  modified_base 3: mod_base = OTHER; note = cytidine-3'-phosphate
  modified_base 4: mod_base = OTHER; note = adenosine-3'-phosphate
  modified_base 5: mod_base = OTHER; note = guanosine-3'-phosphate
  modified_base 6: mod_base = OTHER; note = adenosine-3'-phosphate
  modified_base 7: mod_base = OTHER; note = guanosine-3'-phosphate
  modified_base 8: mod_base = OTHER; note = adenosine-3'-phosphate
  modified_base 9: mod_base = OTHER; note = adenosine-3'-phosphate
  modified_base 10: mod_base = OTHER; note = uridine-3'-phosphate
  modified_base 11: mod_base = OTHER; note = adenosine-3'-phosphate
  modified_base 12: mod_base = OTHER; note = adenosine-3'-phosphate
  modified_base 13: mod_base = OTHER; note = adenosine-3'-phosphate
  modified_base 14: mod_base = OTHER; note = uridine-3'-phosphate
  modified_base 15: mod_base = OTHER; note = uridine-3'-phosphate
  modified_base 16: mod_base = OTHER; note = cytidine-3'-phosphate
  modified_base 17: mod_base = OTHER; note = cytidine-3'-phosphate
  modified_base 18: mod_base = OTHER; note = adenosine-3'-phosphate
  modified_base 19: mod_base = OTHER; note = adenosine-3'-phosphate
  misc_feature 1..19: note = RNA
  misc_feature 20..21: note = DNA
ctcagagaataaattccaatt

SEQ ID NO: 1765 - DNA, 21 bp, synthetic construct
  source 1..21: mol_type = other DNA
  modified_base 1: mod_base = OTHER; note = adenosine-3'-phosphate
  modified_base 2: mod_base = OTHER; note = adenosine-3'-phosphate
  modified_base 3: mod_base = OTHER; note = uridine-3'-phosphate
  modified_base 4: mod_base = OTHER; note = adenosine-3'-phosphate
  modified_base 5: mod_base = OTHER; note = adenosine-3'-phosphate
  modified_base 6: mod_base = OTHER; note = adenosine-3'-phosphate
  modified_base 7: mod_base = OTHER; note = uridine-3'-phosphate
  modified_base 8: mod_base = OTHER; note = uridine-3'-phosphate
  modified_base 9: mod_base = OTHER; note = cytidine-3'-phosphate
  modified_base 10: mod_base = OTHER; note = cytidine-3'-phosphate
  modified_base 11: mod_base = OTHER; note = adenosine-3'-phosphate
  modified_base 12: mod_base = OTHER; note = adenosine-3'-phosphate
  modified_base 13: mod_base = OTHER; note = adenosine-3'-phosphate
  modified_base 14: mod_base = OTHER; note = adenosine-3'-phosphate
  modified_base 15: mod_base = OTHER; note = cytidine-3'-phosphate
  modified_base 16: mod_base = OTHER; note = uridine-3'-phosphate
  modified_base 17: mod_base = OTHER; note = cytidine-3'-phosphate
  modified_base 18: mod_base = OTHER; note = uridine-3'-phosphate
  modified_base 19: mod_base = OTHER; note = guanosine-3'-phosphate
  misc_feature 1..19: note = RNA
  misc_feature 20..21: note = DNA
aataaattccaaaactctgtt

SEQ ID NO: 1766 - DNA, 21 bp, synthetic construct
  source 1..21: mol_type = other DNA
  modified_base 1: mod_base = OTHER; note = cytidine-3'-phosphate
  modified_base 2: mod_base = OTHER; note = uridine-3'-phosphate
  modified_base 3: mod_base = OTHER; note = cytidine-3'-phosphate
  modified_base 4: mod_base = OTHER; note = uridine-3'-phosphate
  modified_base 5: mod_base = OTHER; note = guanosine-3'-phosphate
  modified_base 6: mod_base = OTHER; note = cytidine-3'-phosphate
  modified_base 7: mod_base = OTHER; note = adenosine-3'-phosphate
  modified_base 8: mod_base = OTHER; note = adenosine-3'-phosphate
  modified_base 9: mod_base = OTHER; note = uridine-3'-phosphate
  modified_base 10: mod_base = OTHER; note = cytidine-3'-phosphate
  modified_base 11: mod_base = OTHER; note = uridine-3'-phosphate
  modified_base 12: mod_base = OTHER; note = uridine-3'-phosphate
  modified_base 13: mod_base = OTHER; note = adenosine-3'-phosphate
  modified_base 14: mod_base = OTHER; note = adenosine-3'-phosphate
  modified_base 15: mod_base = OTHER; note = cytidine-3'-phosphate
  modified_base 16: mod_base = OTHER; note = adenosine-3'-phosphate
  modified_base 17: mod_base = OTHER; note = adenosine-3'-phosphate
  modified_base 18: mod_base = OTHER; note = uridine-3'-phosphate
  modified_base 19: mod_base = OTHER; note = adenosine-3'-phosphate
  misc_feature 1..19: note = RNA
  misc_feature 20..21: note = DNA
ctctgcaatcttaacaatatt

SEQ ID NO: 1767 - DNA, 21 bp, synthetic construct
  source 1..21: mol_type = other DNA
  modified_base 1: mod_base = OTHER; note = cytidine-3'-phosphate
  modified_base 2: mod_base = OTHER; note = uridine-3'-phosphate
  modified_base 3: mod_base = OTHER; note = uridine-3'-phosphate
  modified_base 4: mod_base = OTHER; note = adenosine-3'-phosphate
  modified_base 5: mod_base = OTHER; note = adenosine-3'-phosphate
  modified_base 6: mod_base = OTHER; note = cytidine-3'-phosphate
  modified_base 7: mod_base = OTHER; note = adenosine-3'-phosphate
  modified_base 8: mod_base = OTHER; note = adenosine-3'-phosphate
  modified_base 9: mod_base = OTHER; note = uridine-3'-phosphate
  modified_base 10: mod_base = OTHER; note = adenosine-3'-phosphate
  modified_base 11: mod_base = OTHER; note = cytidine-3'-phosphate
  modified_base 12: mod_base = OTHER; note = adenosine-3'-phosphate
  modified_base 13: mod_base = OTHER; note = adenosine-3'-phosphate
  modified_base 14: mod_base = OTHER; note = cytidine-3'-phosphate
  modified_base 15: mod_base = OTHER; note = cytidine-3'-phosphate
  modified_base 16: mod_base = OTHER; note = adenosine-3'-phosphate
  modified_base 17: mod_base = OTHER; note = adenosine-3'-phosphate
  modified_base 18: mod_base = OTHER; note = adenosine-3'-phosphate
  modified_base 19: mod_base = OTHER; note = adenosine-3'-phosphate
  misc_feature 1..19: note = RNA
  misc_feature 20..21: note = DNA
cttaacaatacaaccaaaatt

SEQ ID NO: 1768 - DNA, 21 bp, synthetic construct
  source 1..21: mol_type = other DNA
  modified_base 1: mod_base = OTHER; note = cytidine-3'-phosphate
  modified_base 2: mod_base = OTHER; note = adenosine-3'-phosphate
  modified_base 3: mod_base = OTHER; note = adenosine-3'-phosphate
  modified_base 4: mod_base = OTHER; note = cytidine-3'-phosphate
  modified_base 5: mod_base = OTHER; note = cytidine-3'-phosphate
  modified_base 6: mod_base = OTHER; note = adenosine-3'-phosphate
  modified_base 7: mod_base = OTHER; note = adenosine-3'-phosphate
  modified_base 8: mod_base = OTHER; note = adenosine-3'-phosphate
  modified_base 9: mod_base = OTHER; note = adenosine-3'-phosphate
  modified_base 10: mod_base = OTHER; note = cytidine-3'-phosphate
  modified_base 11: mod_base = OTHER; note = adenosine-3'-phosphate
  modified_base 12: mod_base = OTHER; note = adenosine-3'-phosphate
  modified_base 13: mod_base = OTHER; note = uridine-3'-phosphate
  modified_base 14: mod_base = OTHER; note = uridine-3'-phosphate
  modified_base 15: mod_base = OTHER; note = guanosine-3'-phosphate
  modified_base 16: mod_base = OTHER; note = cytidine-3'-phosphate
  modified_base 17: mod_base = OTHER; note = cytidine-3'-phosphate
  modified_base 18: mod_base = OTHER; note = uridine-3'-phosphate
  modified_base 19: mod_base = OTHER; note = guanosine-3'-phosphate
  misc_feature 1..19: note = RNA
  misc_feature 20..21: note = DNA
caaccaaaacaattgcctgtt

SEQ ID NO: 1769 - DNA, 21 bp, synthetic construct
  source 1..21: mol_type = other DNA
  modified_base 1: mod_base = OTHER; note = cytidine-3'-phosphate
  modified_base 2: mod_base = OTHER; note = adenosine-3'-phosphate
  modified_base 3: mod_base = OTHER; note = adenosine-3'-phosphate
  modified_base 4: mod_base = OTHER; note = uridine-3'-phosphate
  modified_base 5: mod_base = OTHER; note = uridine-3'-phosphate
  modified_base 6: mod_base = OTHER; note = guanosine-3'-phosphate
  modified_base 7: mod_base = OTHER; note = cytidine-3'-phosphate
  modified_base 8: mod_base = OTHER; note = cytidine-3'-phosphate
  modified_base 9: mod_base = OTHER; note = uridine-3'-phosphate
  modified_base 10: mod_base = OTHER; note = guanosine-3'-phosphate
  modified_base 11: mod_base = OTHER; note = guanosine-3'-phosphate
  modified_base 12: mod_base = OTHER; note = adenosine-3'-phosphate
  modified_base 13: mod_base = OTHER; note = guanosine-3'-phosphate
  modified_base 14: mod_base = OTHER; note = guanosine-3'-phosphate
  modified_base 15: mod_base = OTHER; note = adenosine-3'-phosphate
  modified_base 16: mod_base = OTHER; note = cytidine-3'-phosphate
  modified_base 17: mod_base = OTHER; note = adenosine-3'-phosphate
  modified_base 18: mod_base = OTHER; note = adenosine-3'-phosphate
  modified_base 19: mod_base = OTHER; note = adenosine-3'-phosphate
  misc_feature 1..19: note = RNA
  misc_feature 20..21: note = DNA
caattgcctggaggacaaatt

SEQ ID NO: 1770 - DNA, 21 bp, synthetic construct
  source 1..21: mol_type = other DNA
  modified_base 1: mod_base = OTHER; note = guanosine-3'-phosphate
  modified_base 2: mod_base = OTHER; note = guanosine-3'-phosphate
  modified_base 3: mod_base = OTHER; note = adenosine-3'-phosphate
  modified_base 4: mod_base = OTHER; note = cytidine-3'-phosphate
  modified_base 5: mod_base = OTHER; note = adenosine-3'-phosphate
  modified_base 6: mod_base = OTHER; note = adenosine-3'-phosphate
  modified_base 7: mod_base = OTHER; note = adenosine-3'-phosphate
  modified_base 8: mod_base = OTHER; note = adenosine-3'-phosphate
  modified_base 9: mod_base = OTHER; note = cytidine-3'-phosphate
  modified_base 10: mod_base = OTHER; note = cytidine-3'-phosphate
  modified_base 11: mod_base = OTHER; note = cytidine-3'-phosphate
  modified_base 12: mod_base = OTHER; note = adenosine-3'-phosphate
  modified_base 13: mod_base = OTHER; note = guanosine-3'-phosphate
  modified_base 14: mod_base = OTHER; note = uridine-3'-phosphate
  modified_base 15: mod_base = OTHER; note = uridine-3'-phosphate
  modified_base 16: mod_base = OTHER; note = uridine-3'-phosphate
  modified_base 17: mod_base = OTHER; note = cytidine-3'-phosphate
  modified_base 18: mod_base = OTHER; note = uridine-3'-phosphate
  modified_base 19: mod_base = OTHER; note = uridine-3'-phosphate
  misc_feature 1..19: note = RNA
  misc_feature 20..21: note = DNA
ggacaaaacccagtttctttt

SEQ ID NO: 1771 - DNA, 21 bp, synthetic construct
  source 1..21: mol_type = other DNA
  modified_base 1: mod_base = OTHER; note = cytidine-3'-phosphate
  modified_base 2: mod_base = OTHER; note = cytidine-3'-phosphate
  modified_base 3: mod_base = OTHER; note = adenosine-3'-phosphate
  modified_base 4: mod_base = OTHER; note = guanosine-3'-phosphate
  modified_base 5: mod_base = OTHER; note = uridine-3'-phosphate
  modified_base 6: mod_base = OTHER; note = uridine-3'-phosphate
  modified_base 7: mod_base = OTHER; note = uridine-3'-phosphate
  modified_base 8: mod_base = OTHER; note = cytidine-3'-phosphate
  modified_base 9: mod_base = OTHER; note = uridine-3'-phosphate
  modified_base 10: mod_base = OTHER; note = uridine-3'-phosphate
  modified_base 11: mod_base = OTHER; note = adenosine-3'-phosphate
  modified_base 12: mod_base = OTHER; note = uridine-3'-phosphate
  modified_base 13: mod_base = OTHER; note = guanosine-3'-phosphate
  modified_base 14: mod_base = OTHER; note = uridine-3'-phosphate
  modified_base 15: mod_base = OTHER; note = guanosine-3'-phosphate
  modified_base 16: mod_base = OTHER; note = uridine-3'-phosphate
  modified_base 17: mod_base = OTHER; note = adenosine-3'-phosphate
  modified_base 18: mod_base = OTHER; note = uridine-3'-phosphate
  modified_base 19: mod_base = OTHER; note = uridine-3'-phosphate
  misc_feature 1..19: note = RNA
  misc_feature 20..21: note = DNA
ccagtttcttatgtgtatttt

SEQ ID NO: 1772 - DNA, 21 bp, synthetic construct
  source 1..21: mol_type = other DNA
  modified_base 1: mod_base = OTHER; note = adenosine-3'-phosphate
  modified_base 2: mod_base = OTHER; note = uridine-3'-phosphate
  modified_base 3: mod_base = OTHER; note = guanosine-3'-phosphate
  modified_base 4: mod_base = OTHER; note = uridine-3'-phosphate
  modified_base 5: mod_base = OTHER; note = guanosine-3'-phosphate
  modified_base 6: mod_base = OTHER; note = uridine-3'-phosphate
  modified_base 7: mod_base = OTHER; note = adenosine-3'-phosphate
  modified_base 8: mod_base = OTHER; note = uridine-3'-phosphate
  modified_base 9: mod_base = OTHER; note = uridine-3'-phosphate
  modified_base 10: mod_base = OTHER; note = uridine-3'-phosphate
  modified_base 11: mod_base = OTHER; note = guanosine-3'-phosphate
  modified_base 12: mod_base = OTHER; note = guanosine-3'-phosphate
  modified_base 13: mod_base = OTHER; note = adenosine-3'-phosphate
  modified_base 14: mod_base = OTHER; note = adenosine-3'-phosphate
  modified_base 15: mod_base = OTHER; note = guanosine-3'-phosphate
  modified_base 16: mod_base = OTHER; note = uridine-3'-phosphate
  modified_base 17: mod_base = OTHER; note = uridine-3'-phosphate
  modified_base 18: mod_base = OTHER; note = guanosine-3'-phosphate
  modified_base 19: mod_base = OTHER; note = uridine-3'-phosphate
  misc_feature 1..19: note = RNA
  misc_feature 20..21: note = DNA
atgtgtatttggaagttgttt

SEQ ID NO: 1773 - DNA, 21 bp, synthetic construct
  source 1..21: mol_type = other DNA
  modified_base 1: mod_base = OTHER; note = guanosine-3'-phosphate
  modified_base 2: mod_base = OTHER; note = guanosine-3'-phosphate
  modified_base 3: mod_base = OTHER; note = adenosine-3'-phosphate
  modified_base 4: mod_base = OTHER; note = adenosine-3'-phosphate
  modified_base 5: mod_base = OTHER; note = guanosine-3'-phosphate
  modified_base 6: mod_base = OTHER; note = uridine-3'-phosphate
  modified_base 7: mod_base = OTHER; note = uridine-3'-phosphate
  modified_base 8: mod_base = OTHER; note = guanosine-3'-phosphate
  modified_base 9: mod_base = OTHER; note = uridine-3'-phosphate
  modified_base 10: mod_base = OTHER; note = adenosine-3'-phosphate
  modified_base 11: mod_base = OTHER; note = uridine-3'-phosphate
  modified_base 12: mod_base = OTHER; note = cytidine-3'-phosphate
  modified_base 13: mod_base = OTHER; note = adenosine-3'-phosphate
  modified_base 14: mod_base = OTHER; note = adenosine-3'-phosphate
  modified_base 15: mod_base = OTHER; note = adenosine-3'-phosphate
  modified_base 16: mod_base = OTHER; note = guanosine-3'-phosphate
  modified_base 17: mod_base = OTHER; note = cytidine-3'-phosphate
  modified_base 18: mod_base = OTHER; note = adenosine-3'-phosphate
  modified_base 19: mod_base = OTHER; note = uridine-3'-phosphate
  misc_feature 1..19: note = RNA
  misc_feature 20..21: note = DNA
ggaagttgtatcaaagcattt

SEQ ID NO: 1774 - DNA, 21 bp, synthetic construct
  source 1..21: mol_type = other DNA
  modified_base 1: mod_base = OTHER; note = guanosine-3'-phosphate
  modified_base 2: mod_base = OTHER; note = uridine-3'-phosphate
  modified_base 3: mod_base = OTHER; note = adenosine-3'-phosphate
  modified_base 4: mod_base = OTHER; note = uridine-3'-phosphate
  modified_base 5: mod_base = OTHER; note = cytidine-3'-phosphate
  modified_base 6: mod_base = OTHER; note = adenosine-3'-phosphate
  modified_base 7: mod_base = OTHER; note = adenosine-3'-phosphate
  modified_base 8: mod_base = OTHER; note = adenosine-3'-phosphate
  modified_base 9: mod_base = OTHER; note = guanosine-3'-phosphate
  modified_base 10: mod_base = OTHER; note = cytidine-3'-phosphate
  modified_base 11: mod_base = OTHER; note = adenosine-3'-phosphate
  modified_base 12: mod_base = OTHER; note = uridine-3'-phosphate
  modified_base 13: mod_base = OTHER; note = uridine-3'-phosphate
  modified_base 14: mod_base = OTHER; note = uridine-3'-phosphate
  modified_base 15: mod_base = OTHER; note = uridine-3'-phosphate
  modified_base 16: mod_base = OTHER; note = uridine-3'-phosphate
  modified_base 17: mod_base = OTHER; note = cytidine-3'-phosphate
  modified_base 18: mod_base = OTHER; note = adenosine-3'-phosphate
  modified_base 19: mod_base = OTHER; note = adenosine-3'-phosphate
  misc_feature 1..19: note = RNA
  misc_feature 20..21: note = DNA
gtatcaaagcatttttcaatt

SEQ ID NO: 1775 - DNA, 21 bp, synthetic construct
  source 1..21: mol_type = other DNA
  modified_base 1: mod_base = OTHER; note = uridine-3'-phosphate
  modified_base 2: mod_base = OTHER; note = uridine-3'-phosphate
  modified_base 3: mod_base = OTHER; note = uridine-3'-phosphate
  modified_base 4: mod_base = OTHER; note = uridine-3'-phosphate
  modified_base 5: mod_base = OTHER; note = cytidine-3'-phosphate
  modified_base 6: mod_base = OTHER; note = adenosine-3'-phosphate
  modified_base 7: mod_base = OTHER; note = adenosine-3'-phosphate
  modified_base 8: mod_base = OTHER; note = adenosine-3'-phosphate
  modified_base 9: mod_base = OTHER; note = adenosine-3'-phosphate
  modified_base 10: mod_base = OTHER; note = uridine-3'-phosphate
  modified_base 11: mod_base = OTHER; note = cytidine-3'-phosphate
  modified_base 12: mod_base = OTHER; note = adenosine-3'-phosphate
  modified_base 13: mod_base = OTHER; note = adenosine-3'-phosphate
  modified_base 14: mod_base = OTHER; note = adenosine-3'-phosphate
  modified_base 15: mod_base = OTHER; note = adenosine-3'-phosphate
  modified_base 16: mod_base = OTHER; note = adenosine-3'-phosphate
  modified_base 17: mod_base = OTHER; note = guanosine-3'-phosphate
  modified_base 18: mod_base = OTHER; note = adenosine-3'-phosphate
  modified_base 19: mod_base = OTHER; note = adenosine-3'-phosphate
  misc_feature 1..19: note = RNA
  misc_feature 20..21: note = DNA
ttttcaaaatcaaaaagaatt

SEQ ID NO: 1776 - DNA, 21 bp, synthetic construct
  source 1..21: mol_type = other DNA
  modified_base 1: mod_base = OTHER; note = cytidine-3'-phosphate
  modified_base 2: mod_base = OTHER; note = adenosine-3'-phosphate
  modified_base 3: mod_base = OTHER; note = adenosine-3'-phosphate
  modified_base 4: mod_base = OTHER; note = adenosine-3'-phosphate
  modified_base 5: mod_base = OTHER; note = adenosine-3'-phosphate
  modified_base 6: mod_base = OTHER; note = adenosine-3'-phosphate
  modified_base 7: mod_base = OTHER; note = guanosine-3'-phosphate
  modified_base 8: mod_base = OTHER; note = adenosine-3'-phosphate
  modified_base 9: mod_base = OTHER; note = adenosine-3'-phosphate
  modified_base 10: mod_base = OTHER; note = uridine-3'-phosphate
  modified_base 11: mod_base = OTHER; note = guanosine-3'-phosphate
  modified_base 12: mod_base = OTHER; note = cytidine-3'-phosphate
  modified_base 13: mod_base = OTHER; note = cytidine-3'-phosphate
  modified_base 14: mod_base = OTHER; note = adenosine-3'-phosphate
  modified_base 15: mod_base = OTHER; note = adenosine-3'-phosphate
  modified_base 16: mod_base = OTHER; note = uridine-3'-phosphate
  modified_base 17: mod_base = OTHER; note = adenosine-3'-phosphate
  modified_base 18: mod_base = OTHER; note = adenosine-3'-phosphate
  modified_base 19: mod_base = OTHER; note = cytidine-3'-phosphate
  misc_feature 1..19: note = RNA
  misc_feature 20..21: note = DNA
caaaaagaatgccaataactt

SEQ ID NO: 1777 - DNA, 21 bp, synthetic construct
  source 1..21: mol_type = other DNA
  modified_base 1: mod_base = OTHER; note = guanosine-3'-phosphate
  modified_base 2: mod_base = OTHER; note = cytidine-3'-phosphate
  modified_base 3: mod_base = OTHER; note = cytidine-3'-phosphate
  modified_base 4: mod_base = OTHER; note = adenosine-3'-phosphate
  modified_base 5: mod_base = OTHER; note = adenosine-3'-phosphate
  modified_base 6: mod_base = OTHER; note = uridine-3'-phosphate
  modified_base 7: mod_base = OTHER; note = adenosine-3'-phosphate
  modified_base 8: mod_base = OTHER; note = adenosine-3'-phosphate
  modified_base 9: mod_base = OTHER; note = cytidine-3'-phosphate
  modified_base 10: mod_base = OTHER; note = cytidine-3'-phosphate
  modified_base 11: mod_base = OTHER; note = uridine-3'-phosphate
  modified_base 12: mod_base = OTHER; note = adenosine-3'-phosphate
  modified_base 13: mod_base = OTHER; note = uridine-3'-phosphate
  modified_base 14: mod_base = OTHER; note = guanosine-3'-phosphate
  modified_base 15: mod_base = OTHER; note = adenosine-3'-phosphate
  modified_base 16: mod_base = OTHER; note = cytidine-3'-phosphate
  modified_base 17: mod_base = OTHER; note = adenosine-3'-phosphate
  modified_base 18: mod_base = OTHER; note = adenosine-3'-phosphate
  modified_base 19: mod_base = OTHER; note = uridine-3'-phosphate
  misc_feature 1..19: note = RNA
  misc_feature 20..21: note = DNA
gccaataacctatgacaattt

SEQ ID NO: 1778 - DNA, 21 bp, synthetic construct
  source 1..21: mol_type = other DNA
  modified_base 1: mod_base = OTHER; note = cytidine-3'-phosphate
  modified_base 2: mod_base = OTHER; note = cytidine-3'-phosphate
  modified_base 3: mod_base = OTHER; note = uridine-3'-phosphate
  modified_base 4: mod_base = OTHER; note = adenosine-3'-phosphate
  modified_base 5: mod_base = OTHER; note = uridine-3'-phosphate
  modified_base 6: mod_base = OTHER; note = guanosine-3'-phosphate
  modified_base 7: mod_base = OTHER; note = adenosine-3'-phosphate
  modified_base 8: mod_base = OTHER; note = cytidine-3'-phosphate
  modified_base 9: mod_base = OTHER; note = adenosine-3'-phosphate
  modified_base 10: mod_base = OTHER; note = adenosine-3'-phosphate
  modified_base 11: mod_base = OTHER; note = uridine-3'-phosphate
  modified_base 12: mod_base = OTHER; note = guanosine-3'-phosphate
  modified_base 13: mod_base = OTHER; note = guanosine-3'-phosphate
  modified_base 14: mod_base = OTHER; note = adenosine-3'-phosphate
  modified_base 15: mod_base = OTHER; note = uridine-3'-phosphate
  modified_base 16: mod_base = OTHER; note = uridine-3'-phosphate
  modified_base 17: mod_base = OTHER; note = uridine-3'-phosphate
  modified_base 18: mod_base = OTHER; note = cytidine-3'-phosphate
  modified_base 19: mod_base = OTHER; note = uridine-3'-phosphate
  misc_feature 1..19: note = RNA
  misc_feature 20..21: note = DNA
cctatgacaatggatttcttt

SEQ ID NO: 1779 - DNA, 21 bp, synthetic construct
  source 1..21: mol_type = other DNA
  modified_base 1: mod_base = OTHER; note = uridine-3'-phosphate
  modified_base 2: mod_base = OTHER; note = guanosine-3'-phosphate
  modified_base 3: mod_base = OTHER; note = guanosine-3'-phosphate
  modified_base 4: mod_base = OTHER; note = adenosine-3'-phosphate
  modified_base 5: mod_base = OTHER; note = uridine-3'-phosphate
  modified_base 6: mod_base = OTHER; note = uridine-3'-phosphate
  modified_base 7: mod_base = OTHER; note = uridine-3'-phosphate
  modified_base 8: mod_base = OTHER; note = cytidine-3'-phosphate
  modified_base 9: mod_base = OTHER; note = uridine-3'-phosphate
  modified_base 10: mod_base = OTHER; note = cytidine-3'-phosphate
  modified_base 11: mod_base = OTHER; note = uridine-3'-phosphate
  modified_base 12: mod_base = OTHER; note = uridine-3'-phosphate
  modified_base 13: mod_base = OTHER; note = cytidine-3'-phosphate
  modified_base 14: mod_base = OTHER; note = adenosine-3'-phosphate
  modified_base 15: mod_base = OTHER; note = uridine-3'-phosphate
  modified_base 16: mod_base = OTHER; note = uridine-3'-phosphate
  modified_base 17: mod_base = OTHER; note = cytidine-3'-phosphate
  modified_base 18: mod_base = OTHER; note = adenosine-3'-phosphate
  modified_base 19: mod_base = OTHER; note = uridine-3'-phosphate
  misc_feature 1..19: note = RNA
  misc_feature 20..21: note = DNA
tggatttctcttcattcattt

SEQ ID NO: 1780 - DNA, 21 bp, synthetic construct
  source 1..21: mol_type = other DNA
  modified_base 1: mod_base = OTHER; note = cytidine-3'-phosphate
  modified_base 2: mod_base = OTHER; note = adenosine-3'-phosphate
  modified_base 3: mod_base = OTHER; note = uridine-3'-phosphate
  modified_base 4: mod_base = OTHER; note = uridine-3'-phosphate
  modified_base 5: mod_base = OTHER; note = cytidine-3'-phosphate
  modified_base 6: mod_base = OTHER; note = adenosine-3'-phosphate
  modified_base 7: mod_base = OTHER; note = uridine-3'-phosphate
  modified_base 8: mod_base = OTHER; note = adenosine-3'-phosphate
  modified_base 9: mod_base = OTHER; note = cytidine-3'-phosphate
  modified_base 10: mod_base = OTHER; note = adenosine-3'-phosphate
  modified_base 11: mod_base = OTHER; note = guanosine-3'-phosphate
  modified_base 12: mod_base = OTHER; note = adenosine-3'-phosphate
  modified_base 13: mod_base = OTHER; note = cytidine-3'-phosphate
  modified_base 14: mod_base = OTHER; note = adenosine-3'-phosphate
  modified_base 15: mod_base = OTHER; note = adenosine-3'-phosphate
  modified_base 16: mod_base = OTHER; note = adenosine-3'-phosphate
  modified_base 17: mod_base = OTHER; note = cytidine-3'-phosphate
  modified_base 18: mod_base = OTHER; note = cytidine-3'-phosphate
  modified_base 19: mod_base = OTHER; note = uridine-3'-phosphate
  misc_feature 1..19: note = RNA
  misc_feature 20..21: note = DNA
cattcatacagacaaaccttt

SEQ ID NO: 1781 - DNA, 21 bp, synthetic construct
  source 1..21: mol_type = other DNA
  modified_base 1: mod_base = OTHER; note = cytidine-3'-phosphate
  modified_base 2: mod_base = OTHER; note = adenosine-3'-phosphate
  modified_base 3: mod_base = OTHER; note = guanosine-3'-phosphate
  modified_base 4: mod_base = OTHER; note = adenosine-3'-phosphate
  modified_base 5: mod_base = OTHER; note = cytidine-3'-phosphate
  modified_base 6: mod_base = OTHER; note = adenosine-3'-phosphate
  modified_base 7: mod_base = OTHER; note = adenosine-3'-phosphate
  modified_base 8: mod_base = OTHER; note = adenosine-3'-phosphate
  modified_base 9: mod_base = OTHER; note = cytidine-3'-phosphate
  modified_base 10: mod_base = OTHER; note = cytidine-3'-phosphate
  modified_base 11: mod_base = OTHER; note = uridine-3'-phosphate
  modified_base 12: mod_base = OTHER; note = guanosine-3'-phosphate
  modified_base 13: mod_base = OTHER; note = uridine-3'-phosphate
  modified_base 14: mod_base = OTHER; note = uridine-3'-phosphate
  modified_base 15: mod_base = OTHER; note = uridine-3'-phosphate
  modified_base 16: mod_base = OTHER; note = adenosine-3'-phosphate
  modified_base 17: mod_base = OTHER; note = uridine-3'-phosphate
  modified_base 18: mod_base = OTHER; note = adenosine-3'-phosphate
  modified_base 19: mod_base = OTHER; note = cytidine-3'-phosphate
  misc_feature 1..19: note = RNA
  misc_feature 20..21: note = DNA
cagacaaacctgtttatactt

SEQ ID NO: 1782 - DNA, 21 bp, synthetic construct
  source 1..21: mol_type = other DNA
  modified_base 1: mod_base = OTHER; note = guanosine-3'-phosphate
  modified_base 2: mod_base = OTHER; note = uridine-3'-phosphate
  modified_base 3: mod_base = OTHER; note = uridine-3'-phosphate
  modified_base 4: mod_base = OTHER; note = uridine-3'-phosphate
  modified_base 5: mod_base = OTHER; note = adenosine-3'-phosphate
  modified_base 6: mod_base = OTHER; note = uridine-3'-phosphate
  modified_base 7: mod_base = OTHER; note = adenosine-3'-phosphate
  modified_base 8: mod_base = OTHER; note = cytidine-3'-phosphate
  modified_base 9: mod_base = OTHER; note = uridine-3'-phosphate
  modified_base 10: mod_base = OTHER; note = cytidine-3'-phosphate
  modified_base 11: mod_base = OTHER; note = cytidine-3'-phosphate
  modified_base 12: mod_base = OTHER; note = adenosine-3'-phosphate
  modified_base 13: mod_base = OTHER; note = guanosine-3'-phosphate
  modified_base 14: mod_base = OTHER; note = adenosine-3'-phosphate
  modified_base 15: mod_base = OTHER; note = cytidine-3'-phosphate
  modified_base 16: mod_base = OTHER; note = cytidine-3'-phosphate
  modified_base 17: mod_base = OTHER; note = adenosine-3'-phosphate
  modified_base 18: mod_base = OTHER; note = guanosine-3'-phosphate
  modified_base 19: mod_base = OTHER; note = uridine-3'-phosphate
  misc_feature 1..19: note = RNA
  misc_feature 20..21: note = DNA
gtttatactccagaccagttt

SEQ ID NO: 1783 - DNA, 21 bp, synthetic construct
  source 1..21: mol_type = other DNA
  modified_base 1: mod_base = OTHER; note = adenosine-3'-phosphate
  modified_base 2: mod_base = OTHER; note = guanosine-3'-phosphate
  modified_base 3: mod_base = OTHER; note = adenosine-3'-phosphate
  modified_base 4: mod_base = OTHER; note = cytidine-3'-phosphate
  modified_base 5: mod_base = OTHER; note = cytidine-3'-phosphate
  modified_base 6: mod_base = OTHER; note = adenosine-3'-phosphate
  modified_base 7: mod_base = OTHER; note = guanosine-3'-phosphate
  modified_base 8: mod_base = OTHER; note = uridine-3'-phosphate
  modified_base 9: mod_base = OTHER; note = cytidine-3'-phosphate
  modified_base 10: mod_base = OTHER; note = adenosine-3'-phosphate
  modified_base 11: mod_base = OTHER; note = guanosine-3'-phosphate
  modified_base 12: mod_base = OTHER; note = uridine-3'-phosphate
  modified_base 13: mod_base = OTHER; note = adenosine-3'-phosphate
  modified_base 14: mod_base = OTHER; note = adenosine-3'-phosphate
  modified_base 15: mod_base = OTHER; note = adenosine-3'-phosphate
  modified_base 16: mod_base = OTHER; note = adenosine-3'-phosphate
  modified_base 17: mod_base = OTHER; note = guanosine-3'-phosphate
  modified_base 18: mod_base = OTHER; note = uridine-3'-phosphate
  modified_base 19: mod_base = OTHER; note = uridine-3'-phosphate
  misc_feature 1..19: note = RNA
  misc_feature 20..21: note = DNA
agaccagtcagtaaaagtttt

SEQ ID NO: 1784 - DNA, 21 bp, synthetic construct
  source 1..21: mol_type = other DNA
  modified_base 1: mod_base = OTHER; note = adenosine-3'-phosphate
  modified_base 2: mod_base = OTHER; note = guanosine-3'-phosphate
  modified_base 3: mod_base = OTHER; note = uridine-3'-phosphate
  modified_base 4: mod_base = OTHER; note = adenosine-3'-phosphate
  modified_base 5: mod_base = OTHER; note = adenosine-3'-phosphate
  modified_base 6: mod_base = OTHER; note = adenosine-3'-phosphate
  modified_base 7: mod_base = OTHER; note = adenosine-3'-phosphate
  modified_base 8: mod_base = OTHER; note = guanosine-3'-phosphate
  modified_base 9: mod_base = OTHER; note = uridine-3'-phosphate
  modified_base 10: mod_base = OTHER; note = uridine-3'-phosphate
  modified_base 11: mod_base = OTHER; note = adenosine-3'-phosphate
  modified_base 12: mod_base = OTHER; note = guanosine-3'-phosphate
  modified_base 13: mod_base = OTHER; note = adenosine-3'-phosphate
  modified_base 14: mod_base = OTHER; note = guanosine-3'-phosphate
  modified_base 15: mod_base = OTHER; note = uridine-3'-phosphate
  modified_base 16: mod_base = OTHER; note = uridine-3'-phosphate
  modified_base 17: mod_base = OTHER; note = uridine-3'-phosphate
  modified_base 18: mod_base = OTHER; note = adenosine-3'-phosphate
  modified_base 19: mod_base = OTHER; note = uridine-3'-phosphate
  misc_feature 1..19: note = RNA
  misc_feature 20..21: note = DNA
agtaaaagttagagtttattt

SEQ ID NO: 1785 - DNA, 21 bp, synthetic construct
  source 1..21: mol_type = other DNA
  modified_base 1: mod_base = OTHER; note = adenosine-3'-phosphate
  modified_base 2: mod_base = OTHER; note = guanosine-3'-phosphate
  modified_base 3: mod_base = OTHER; note = adenosine-3'-phosphate
  modified_base 4: mod_base = OTHER; note = guanosine-3'-phosphate
  modified_base 5: mod_base = OTHER; note = uridine-3'-phosphate
  modified_base 6: mod_base = OTHER; note = uridine-3'-phosphate
  modified_base 7: mod_base = OTHER; note = uridine-3'-phosphate
  modified_base 8: mod_base = OTHER; note = adenosine-3'-phosphate
  modified_base 9: mod_base = OTHER; note = uridine-3'-phosphate
  modified_base 10: mod_base = OTHER; note = uridine-3'-phosphate
  modified_base 11: mod_base = OTHER; note = cytidine-3'-phosphate
  modified_base 12: mod_base = OTHER; note = guanosine-3'-phosphate
  modified_base 13: mod_base = OTHER; note = uridine-3'-phosphate
  modified_base 14: mod_base = OTHER; note = uridine-3'-phosphate
  modified_base 15: mod_base = OTHER; note = guanosine-3'-phosphate
  modified_base 16: mod_base = OTHER; note = adenosine-3'-phosphate
  modified_base 17: mod_base = OTHER; note = adenosine-3'-phosphate
  modified_base 18: mod_base = OTHER; note = uridine-3'-phosphate
  modified_base 19: mod_base = OTHER; note = guanosine-3'-phosphate
  misc_feature 1..19: note = RNA
  misc_feature 20..21: note = DNA
agagtttattcgttgaatgtt

SEQ ID NO: 1786 - DNA, 21 bp, synthetic construct
  source 1..21: mol_type = other DNA
  modified_base 1: mod_base = OTHER; note = cytidine-3'-phosphate
  modified_base 2: mod_base = OTHER; note = guanosine-3'-phosphate
  modified_base 3: mod_base = OTHER; note = uridine-3'-phosphate
  modified_base 4: mod_base = OTHER; note = uridine-3'-phosphate
  modified_base 5: mod_base = OTHER; note = guanosine-3'-phosphate
  modified_base 6: mod_base = OTHER; note = adenosine-3'-phosphate
  modified_base 7: mod_base = OTHER; note = adenosine-3'-phosphate
  modified_base 8: mod_base = OTHER; note = uridine-3'-phosphate
  modified_base 9: mod_base = OTHER; note = guanosine-3'-phosphate
  modified_base 10: mod_base = OTHER; note = adenosine-3'-phosphate
  modified_base 11: mod_base = OTHER; note = cytidine-3'-phosphate
  modified_base 12: mod_base = OTHER; note = guanosine-3'-phosphate
  modified_base 13: mod_base = OTHER; note = adenosine-3'-phosphate
  modified_base 14: mod_base = OTHER; note = cytidine-3'-phosphate
  modified_base 15: mod_base = OTHER; note = uridine-3'-phosphate
  modified_base 16: mod_base = OTHER; note = uridine-3'-phosphate
  modified_base 17: mod_base = OTHER; note = guanosine-3'-phosphate
  modified_base 18: mod_base = OTHER; note = adenosine-3'-phosphate
  modified_base 19: mod_base = OTHER; note = adenosine-3'-phosphate
  misc_feature 1..19: note = RNA
  misc_feature 20..21: note = DNA
cgttgaatgacgacttgaatt

SEQ ID NO: 1787 - DNA, 21 bp, synthetic construct
  source 1..21: mol_type = other DNA
  modified_base 1: mod_base = OTHER; note = cytidine-3'-phosphate
  modified_base 2: mod_base = OTHER; note = uridine-3'-phosphate
  modified_base 3: mod_base = OTHER; note = uridine-3'-phosphate
  modified_base 4: mod_base = OTHER; note = guanosine-3'-phosphate
  modified_base 5: mod_base = OTHER; note = adenosine-3'-phosphate
  modified_base 6: mod_base = OTHER; note = adenosine-3'-phosphate
  modified_base 7: mod_base = OTHER; note = guanosine-3'-phosphate
  modified_base 8: mod_base = OTHER; note = cytidine-3'-phosphate
  modified_base 9: mod_base = OTHER; note = cytidine-3'-phosphate
  modified_base 10: mod_base = OTHER; note = adenosine-3'-phosphate
  modified_base 11: mod_base = OTHER; note = guanosine-3'-phosphate
  modified_base 12: mod_base = OTHER; note = cytidine-3'-phosphate
  modified_base 13: mod_base = OTHER; note = cytidine-3'-phosphate
  modified_base 14: mod_base = OTHER; note = adenosine-3'-phosphate
  modified_base 15: mod_base = OTHER; note = adenosine-3'-phosphate
  modified_base 16: mod_base = OTHER; note = adenosine-3'-phosphate
  modified_base 17: mod_base = OTHER; note = adenosine-3'-phosphate
  modified_base 18: mod_base = OTHER; note = guanosine-3'-phosphate
  modified_base 19: mod_base = OTHER; note = adenosine-3'-phosphate
  misc_feature 1..19: note = RNA
  misc_feature 20..21: note = DNA
cttgaagccagccaaaagatt

SEQ ID NO: 1788 - DNA, 21 bp, synthetic construct
  source 1..21: mol_type = other DNA
  modified_base 1: mod_base = OTHER; note = cytidine-3'-phosphate
  modified_base 2: mod_base = OTHER; note = cytidine-3'-phosphate
  modified_base 3: mod_base = OTHER; note = adenosine-3'-phosphate
  modified_base 4: mod_base = OTHER; note = guanosine-3'-phosphate
  modified_base 5: mod_base = OTHER; note = cytidine-3'-phosphate
  modified_base 6: mod_base = OTHER; note = cytidine-3'-phosphate
  modified_base 7: mod_base = OTHER; note = adenosine-3'-phosphate
  modified_base 8: mod_base = OTHER; note = adenosine-3'-phosphate
  modified_base 9: mod_base = OTHER; note = adenosine-3'-phosphate
  modified_base 10: mod_base = OTHER; note = adenosine-3'-phosphate
  modified_base 11: mod_base = OTHER; note = guanosine-3'-phosphate
  modified_base 12: mod_base = OTHER; note = adenosine-3'-phosphate
  modified_base 13: mod_base = OTHER; note = guanosine-3'-phosphate
  modified_base 14: mod_base = OTHER; note = adenosine-3'-phosphate
  modified_base 15: mod_base = OTHER; note = adenosine-3'-phosphate
  modified_base 16: mod_base = OTHER; note = adenosine-3'-phosphate
  modified_base 17: mod_base = OTHER; note = cytidine-3'-phosphate
  modified_base 18: mod_base = OTHER; note = uridine-3'-phosphate
  modified_base 19: mod_base = OTHER; note = guanosine-3'-phosphate
  misc_feature 1..19: note = RNA
  misc_feature 20..21: note = DNA
ccagccaaaagagaaactgtt

SEQ ID NO: 1789 - DNA, 21 bp, synthetic construct
  source 1..21: mol_type = other DNA
  modified_base 1: mod_base = OTHER; note = adenosine-3'-phosphate
  modified_base 2: mod_base = OTHER; note = adenosine-3'-phosphate
  modified_base 3: mod_base = OTHER; note = adenosine-3'-phosphate
  modified_base 4: mod_base = OTHER; note = cytidine-3'-phosphate
  modified_base 5: mod_base = OTHER; note = uridine-3'-phosphate
  modified_base 6: mod_base = OTHER; note = guanosine-3'-phosphate
  modified_base 7: mod_base = OTHER; note = uridine-3'-phosphate
  modified_base 8: mod_base = OTHER; note = cytidine-3'-phosphate
  modified_base 9: mod_base = OTHER; note = uridine-3'-phosphate
  modified_base 10: mod_base = OTHER; note = uridine-3'-phosphate
  modified_base 11: mod_base = OTHER; note = adenosine-3'-phosphate
  modified_base 12: mod_base = OTHER; note = adenosine-3'-phosphate
  modified_base 13: mod_base = OTHER; note = cytidine-3'-phosphate
  modified_base 14: mod_base = OTHER; note = uridine-3'-phosphate
  modified_base 15: mod_base = OTHER; note = uridine-3'-phosphate
  modified_base 16: mod_base = OTHER; note = uridine-3'-phosphate
  modified_base 17: mod_base = OTHER; note = cytidine-3'-phosphate
  modified_base 18: mod_base = OTHER; note = adenosine-3'-phosphate
  modified_base 19: mod_base = OTHER; note = uridine-3'-phosphate
  misc_feature 1..19: note = RNA
  misc_feature 20..21: note = DNA
aaactgtcttaactttcattt

SEQ ID NO: 1790 - DNA, 21 bp, synthetic construct
  source 1..21: mol_type = other DNA
  modified_base 1: mod_base = OTHER; note = adenosine-3'-phosphate
  modified_base 2: mod_base = OTHER; note = adenosine-3'-phosphate
  modified_base 3: mod_base = OTHER; note = cytidine-3'-phosphate
  modified_base 4: mod_base = OTHER; note = uridine-3'-phosphate
  modified_base 5: mod_base = OTHER; note = uridine-3'-phosphate
  modified_base 6: mod_base = OTHER; note = uridine-3'-phosphate
  modified_base 7: mod_base = OTHER; note = cytidine-3'-phosphate
  modified_base 8: mod_base = OTHER; note = adenosine-3'-phosphate
  modified_base 9: mod_base = OTHER; note = uridine-3'-phosphate
  modified_base 10: mod_base = OTHER; note = adenosine-3'-phosphate
  modified_base 11: mod_base = OTHER; note = guanosine-3'-phosphate
  modified_base 12: mod_base = OTHER; note = adenosine-3'-phosphate
  modified_base 13: mod_base = OTHER; note = uridine-3'-phosphate
  modified_base 14: mod_base = OTHER; note = cytidine-3'-phosphate
  modified_base 15: mod_base = OTHER; note = cytidine-3'-phosphate
  modified_base 16: mod_base = OTHER; note = uridine-3'-phosphate
  modified_base 17: mod_base = OTHER; note = guanosine-3'-phosphate
  modified_base 18: mod_base = OTHER; note = adenosine-3'-phosphate
  modified_base 19: mod_base = OTHER; note = adenosine-3'-phosphate
  misc_feature 1..19: note = RNA
  misc_feature 20..21: note = DNA
aactttcatagatcctgaatt

SEQ ID NO: 1791 - DNA, 21 bp, synthetic construct
  source 1..21: mol_type = other DNA
  modified_base 1: mod_base = OTHER; note = cytidine-3'-phosphate
  modified_base 2: mod_base = OTHER; note = adenosine-3'-phosphate
  modified_base 3: mod_base = OTHER; note = uridine-3'-phosphate
  modified_base 4: mod_base = OTHER; note = adenosine-3'-phosphate
  modified_base 5: mod_base = OTHER; note = guanosine-3'-phosphate
  modified_base 6: mod_base = OTHER; note = adenosine-3'-phosphate
  modified_base 7: mod_base = OTHER; note = uridine-3'-phosphate
  modified_base 8: mod_base = OTHER; note = cytidine-3'-phosphate
  modified_base 9: mod_base = OTHER; note = cytidine-3'-phosphate
  modified_base 10: mod_base = OTHER; note = uridine-3'-phosphate
  modified_base 11: mod_base = OTHER; note = guanosine-3'-phosphate
  modified_base 12: mod_base = OTHER; note = adenosine-3'-phosphate
  modified_base 13: mod_base = OTHER; note = adenosine-3'-phosphate
  modified_base 14: mod_base = OTHER; note = guanosine-3'-phosphate
  modified_base 15: mod_base = OTHER; note = guanosine-3'-phosphate
  modified_base 16: mod_base = OTHER; note = adenosine-3'-phosphate
  modified_base 17: mod_base = OTHER; note = uridine-3'-phosphate
  modified_base 18: mod_base = OTHER; note = cytidine-3'-phosphate
  modified_base 19: mod_base = OTHER; note = adenosine-3'-phosphate
  misc_feature 1..19: note = RNA
  misc_feature 20..21: note = DNA
catagatcctgaaggatcatt

SEQ ID NO: 1792 - DNA, 21 bp, synthetic construct
  source 1..21: mol_type = other DNA
  modified_base 1: mod_base = OTHER; note = guanosine-3'-phosphate
  modified_base 2: mod_base = OTHER; note = adenosine-3'-phosphate
  modified_base 3: mod_base = OTHER; note = adenosine-3'-phosphate
  modified_base 4: mod_base = OTHER; note = guanosine-3'-phosphate
  modified_base 5: mod_base = OTHER; note = guanosine-3'-phosphate
  modified_base 6: mod_base = OTHER; note = adenosine-3'-phosphate
  modified_base 7: mod_base = OTHER; note = uridine-3'-phosphate
  modified_base 8: mod_base = OTHER; note = cytidine-3'-phosphate
  modified_base 9: mod_base = OTHER; note = adenosine-3'-phosphate
  modified_base 10: mod_base = OTHER; note = guanosine-3'-phosphate
  modified_base 11: mod_base = OTHER; note = adenosine-3'-phosphate
  modified_base 12: mod_base = OTHER; note = adenosine-3'-phosphate
  modified_base 13: mod_base = OTHER; note = guanosine-3'-phosphate
  modified_base 14: mod_base = OTHER; note = uridine-3'-phosphate
  modified_base 15: mod_base = OTHER; note = uridine-3'-phosphate
  modified_base 16: mod_base = OTHER; note = guanosine-3'-phosphate
  modified_base 17: mod_base = OTHER; note = adenosine-3'-phosphate
  modified_base 18: mod_base = OTHER; note = cytidine-3'-phosphate
  modified_base 19: mod_base = OTHER; note = adenosine-3'-phosphate
  misc_feature 1..19: note = RNA
  misc_feature 20..21: note = DNA
gaaggatcagaagttgacatt

SEQ ID NO: 1793 - DNA, 21 bp, synthetic construct
  source 1..21: mol_type = other DNA
  modified_base 1: mod_base = OTHER; note = uridine-3'-phosphate
  modified_base 2: mod_base = OTHER; note = guanosine-3'-phosphate
  modified_base 3: mod_base = OTHER; note = adenosine-3'-phosphate
  modified_base 4: mod_base = OTHER; note = cytidine-3'-phosphate
  modified_base 5: mod_base = OTHER; note = adenosine-3'-phosphate
  modified_base 6: mod_base = OTHER; note = uridine-3'-phosphate
  modified_base 7: mod_base = OTHER; note = guanosine-3'-phosphate
  modified_base 8: mod_base = OTHER; note = guanosine-3'-phosphate
  modified_base 9: mod_base = OTHER; note = uridine-3'-phosphate
  modified_base 10: mod_base = OTHER; note = adenosine-3'-phosphate
  modified_base 11: mod_base = OTHER; note = guanosine-3'-phosphate
  modified_base 12: mod_base = OTHER; note = adenosine-3'-phosphate
  modified_base 13: mod_base = OTHER; note = adenosine-3'-phosphate
  modified_base 14: mod_base = OTHER; note = guanosine-3'-phosphate
  modified_base 15: mod_base = OTHER; note = adenosine-3'-phosphate
  modified_base 16: mod_base = OTHER; note = adenosine-3'-phosphate
  modified_base 17: mod_base = OTHER; note = adenosine-3'-phosphate
  modified_base 18: mod_base = OTHER; note = uridine-3'-phosphate
  modified_base 19: mod_base = OTHER; note = uridine-3'-phosphate
  misc_feature 1..19: note = RNA
  misc_feature 20..21: note = DNA
tgacatggtagaagaaatttt

SEQ ID NO: 1794 - DNA, 21 bp, synthetic construct
  source 1..21: mol_type = other DNA
  modified_base 1: mod_base = OTHER; note = guanosine-3'-phosphate
  modified_base 2: mod_base = OTHER; note = adenosine-3'-phosphate
  modified_base 3: mod_base = OTHER; note = adenosine-3'-phosphate
  modified_base 4: mod_base = OTHER; note = guanosine-3'-phosphate
  modified_base 5: mod_base = OTHER; note = adenosine-3'-phosphate
  modified_base 6: mod_base = OTHER; note = adenosine-3'-phosphate
  modified_base 7: mod_base = OTHER; note = adenosine-3'-phosphate
  modified_base 8: mod_base = OTHER; note = uridine-3'-phosphate
  modified_base 9: mod_base = OTHER; note = uridine-3'-phosphate
  modified_base 10: mod_base = OTHER; note = guanosine-3'-phosphate
  modified_base 11: mod_base = OTHER; note = adenosine-3'-phosphate
  modified_base 12: mod_base = OTHER; note = uridine-3'-phosphate
  modified_base 13: mod_base = OTHER; note = cytidine-3'-phosphate
  modified_base 14: mod_base = OTHER; note = adenosine-3'-phosphate
  modified_base 15: mod_base = OTHER; note = uridine-3'-phosphate
  modified_base 16: mod_base = OTHER; note = adenosine-3'-phosphate
  modified_base 17: mod_base = OTHER; note = uridine-3'-phosphate
  modified_base 18: mod_base = OTHER; note = uridine-3'-phosphate
  modified_base 19: mod_base = OTHER; note = guanosine-3'-phosphate
  misc_feature 1..19: note = RNA
  misc_feature 20..21: note = DNA
gaagaaattgatcatattgtt

SEQ ID NO: 1795 - DNA, 21 bp, synthetic construct
  source 1..21: mol_type = other DNA
  modified_base 1: mod_base = OTHER; note = guanosine-3'-phosphate
  modified_base 2: mod_base = OTHER; note = adenosine-3'-phosphate
  modified_base 3: mod_base = OTHER; note = uridine-3'-phosphate
  modified_base 4: mod_base = OTHER; note = cytidine-3'-phosphate
  modified_base 5: mod_base = OTHER; note = adenosine-3'-phosphate
  modified_base 6: mod_base = OTHER; note = uridine-3'-phosphate
  modified_base 7: mod_base = OTHER; note = adenosine-3'-phosphate
  modified_base 8: mod_base = OTHER; note = uridine-3'-phosphate
  modified_base 9: mod_base = OTHER; note = uridine-3'-phosphate
  modified_base 10: mod_base = OTHER; note = guanosine-3'-phosphate
  modified_base 11: mod_base = OTHER; note = guanosine-3'-phosphate
  modified_base 12: mod_base = OTHER; note = adenosine-3'-phosphate
  modified_base 13: mod_base = OTHER; note = adenosine-3'-phosphate
  modified_base 14: mod_base = OTHER; note = uridine-3'-phosphate
  modified_base 15: mod_base = OTHER; note = uridine-3'-phosphate
  modified_base 16: mod_base = OTHER; note = adenosine-3'-phosphate
  modified_base 17: mod_base = OTHER; note = uridine-3'-phosphate
  modified_base 18: mod_base = OTHER; note = cytidine-3'-phosphate
  modified_base 19: mod_base = OTHER; note = uridine-3'-phosphate
  misc_feature 1..19: note = RNA
  misc_feature 20..21: note = DNA
gatcatattggaattatcttt

SEQ ID NO: 1796 - DNA, 21 bp, synthetic construct
  source 1..21: mol_type = other DNA
  modified_base 1: mod_base = OTHER; note = guanosine-3'-phosphate
  modified_base 2: mod_base = OTHER; note = guanosine-3'-phosphate
  modified_base 3: mod_base = OTHER; note = adenosine-3'-phosphate
  modified_base 4: mod_base = OTHER; note = adenosine-3'-phosphate
  modified_base 5: mod_base = OTHER; note = uridine-3'-phosphate
  modified_base 6: mod_base = OTHER; note = uridine-3'-phosphate
  modified_base 7: mod_base = OTHER; note = adenosine-3'-phosphate
  modified_base 8: mod_base = OTHER; note = uridine-3'-phosphate
  modified_base 9: mod_base = OTHER; note = cytidine-3'-phosphate
  modified_base 10: mod_base = OTHER; note = uridine-3'-phosphate
  modified_base 11: mod_base = OTHER; note = cytidine-3'-phosphate
  modified_base 12: mod_base = OTHER; note = uridine-3'-phosphate
  modified_base 13: mod_base = OTHER; note = uridine-3'-phosphate
  modified_base 14: mod_base = OTHER; note = uridine-3'-phosphate
  modified_base 15: mod_base = OTHER; note = uridine-3'-phosphate
  modified_base 16: mod_base = OTHER; note = cytidine-3'-phosphate
  modified_base 17: mod_base = OTHER; note = cytidine-3'-phosphate
  modified_base 18: mod_base = OTHER; note = uridine-3'-phosphate
  modified_base 19: mod_base = OTHER; note = guanosine-3'-phosphate
  misc_feature 1..19: note = RNA
  misc_feature 20..21: note = DNA
ggaattatctcttttcctgtt

SEQ ID NO: 1797 - DNA, 21 bp, synthetic construct
  source 1..21: mol_type = other DNA
  modified_base 1: mod_base = OTHER; note = cytidine-3'-phosphate
  modified_base 2: mod_base = OTHER; note = uridine-3'-phosphate
  modified_base 3: mod_base = OTHER; note = cytidine-3'-phosphate
  modified_base 4: mod_base = OTHER; note = uridine-3'-phosphate
  modified_base 5: mod_base = OTHER; note = uridine-3'-phosphate
  modified_base 6: mod_base = OTHER; note = uridine-3'-phosphate
  modified_base 7: mod_base = OTHER; note = uridine-3'-phosphate
  modified_base 8: mod_base = OTHER; note = cytidine-3'-phosphate
  modified_base 9: mod_base = OTHER; note = cytidine-3'-phosphate
  modified_base 10: mod_base = OTHER; note = uridine-3'-phosphate
  modified_base 11: mod_base = OTHER; note = guanosine-3'-phosphate
  modified_base 12: mod_base = OTHER; note = adenosine-3'-phosphate
  modified_base 13: mod_base = OTHER; note = cytidine-3'-phosphate
  modified_base 14: mod_base = OTHER; note = uridine-3'-phosphate
  modified_base 15: mod_base = OTHER; note = uridine-3'-phosphate
  modified_base 16: mod_base = OTHER; note = cytidine-3'-phosphate
  modified_base 17: mod_base = OTHER; note = adenosine-3'-phosphate
  modified_base 18: mod_base = OTHER; note = adenosine-3'-phosphate
  modified_base 19: mod_base = OTHER; note = guanosine-3'-phosphate
  misc_feature 1..19: note = RNA
  misc_feature 20..21: note = DNA
ctcttttcctgacttcaagtt

SEQ ID NO: 1798 - DNA, 21 bp, synthetic construct
  source 1..21: mol_type = other DNA
  modified_base 1: mod_base = OTHER; note = adenosine-3'-phosphate
  modified_base 2: mod_base = OTHER; note = cytidine-3'-phosphate
  modified_base 3: mod_base = OTHER; note = uridine-3'-phosphate
  modified_base 4: mod_base = OTHER; note = uridine-3'-phosphate
  modified_base 5: mod_base = OTHER; note = cytidine-3'-phosphate
  modified_base 6: mod_base = OTHER; note = adenosine-3'-phosphate
  modified_base 7: mod_base = OTHER; note = adenosine-3'-phosphate
  modified_base 8: mod_base = OTHER; note = guanosine-3'-phosphate
  modified_base 9: mod_base = OTHER; note = adenosine-3'-phosphate
  modified_base 10: mod_base = OTHER; note = uridine-3'-phosphate
  modified_base 11: mod_base = OTHER; note = uridine-3'-phosphate
  modified_base 12: mod_base = OTHER; note = cytidine-3'-phosphate
  modified_base 13: mod_base = OTHER; note = cytidine-3'-phosphate
  modified_base 14: mod_base = OTHER; note = guanosine-3'-phosphate
  modified_base 15: mod_base = OTHER; note = uridine-3'-phosphate
  modified_base 16: mod_base = OTHER; note = cytidine-3'-phosphate
  modified_base 17: mod_base = OTHER; note = uridine-3'-phosphate
  modified_base 18: mod_base = OTHER; note = adenosine-3'-phosphate
  modified_base 19: mod_base = OTHER; note = adenosine-3'-phosphate
  misc_feature 1..19: note = RNA
  misc_feature 20..21: note = DNA
acttcaagattccgtctaatt

SEQ ID NO: 1799 - DNA, 21 bp, synthetic construct
  source 1..21: mol_type = other DNA
  modified_base 1: mod_base = OTHER; note = cytidine-3'-phosphate
  modified_base 2: mod_base = OTHER; note = cytidine-3'-phosphate
  modified_base 3: mod_base = OTHER; note = guanosine-3'-phosphate
  modified_base 4: mod_base = OTHER; note = uridine-3'-phosphate
  modified_base 5: mod_base = OTHER; note = cytidine-3'-phosphate
  modified_base 6: mod_base = OTHER; note = uridine-3'-phosphate
  modified_base 7: mod_base = OTHER; note = adenosine-3'-phosphate
  modified_base 8: mod_base = OTHER; note = adenosine-3'-phosphate
  modified_base 9: mod_base = OTHER; note = uridine-3'-phosphate
  modified_base 10: mod_base = OTHER; note = cytidine-3'-phosphate
  modified_base 11: mod_base = OTHER; note = cytidine-3'-phosphate
  modified_base 12: mod_base = OTHER; note = uridine-3'-phosphate
  modified_base 13: mod_base = OTHER; note = adenosine-3'-phosphate
  modified_base 14: mod_base = OTHER; note = guanosine-3'-phosphate
  modified_base 15: mod_base = OTHER; note = adenosine-3'-phosphate
  modified_base 16: mod_base = OTHER; note = uridine-3'-phosphate
  modified_base 17: mod_base = OTHER; note = adenosine-3'-phosphate
  modified_base 18: mod_base = OTHER; note = uridine-3'-phosphate
  modified_base 19: mod_base = OTHER; note = guanosine-3'-phosphate
  misc_feature 1..19: note = RNA
  misc_feature 20..21: note = DNA
ccgtctaatcctagatatgtt

SEQ ID NO: 1800 - DNA, 21 bp, synthetic construct
  source 1..21: mol_type = other DNA
  modified_base 1: mod_base = OTHER; note = cytidine-3'-phosphate
  modified_base 2: mod_base = OTHER; note = cytidine-3'-phosphate
  modified_base 3: mod_base = OTHER; note = uridine-3'-phosphate
  modified_base 4: mod_base = OTHER; note = adenosine-3'-phosphate
  modified_base 5: mod_base = OTHER; note = guanosine-3'-phosphate
  modified_base 6: mod_base = OTHER; note = adenosine-3'-phosphate
  modified_base 7: mod_base = OTHER; note = uridine-3'-phosphate
  modified_base 8: mod_base = OTHER; note = adenosine-3'-phosphate
  modified_base 9: mod_base = OTHER; note = uridine-3'-phosphate
  modified_base 10: mod_base = OTHER; note = guanosine-3'-phosphate
  modified_base 11: mod_base = OTHER; note = guanosine-3'-phosphate
  modified_base 12: mod_base = OTHER; note = uridine-3'-phosphate
  modified_base 13: mod_base = OTHER; note = adenosine-3'-phosphate
  modified_base 14: mod_base = OTHER; note = uridine-3'-phosphate
  modified_base 15: mod_base = OTHER; note = guanosine-3'-phosphate
  modified_base 16: mod_base = OTHER; note = uridine-3'-phosphate
  modified_base 17: mod_base = OTHER; note = guanosine-3'-phosphate
  modified_base 18: mod_base = OTHER; note = guanosine-3'-phosphate
  modified_base 19: mod_base = OTHER; note = adenosine-3'-phosphate
  misc_feature 1..19: note = RNA
  misc_feature 20..21: note = DNA
cctagatatggtatgtggatt

SEQ ID NO: 1801 - DNA, 21 bp, synthetic construct
  source 1..21: mol_type = other DNA
  modified_base 1: mod_base = OTHER; note = uridine-3'-phosphate
  modified_base 2: mod_base = OTHER; note = guanosine-3'-phosphate
  modified_base 3: mod_base = OTHER; note = uridine-3'-phosphate
  modified_base 4: mod_base = OTHER; note = guanosine-3'-phosphate
  modified_base 5: mod_base = OTHER; note = guanosine-3'-phosphate
  modified_base 6: mod_base = OTHER; note = adenosine-3'-phosphate
  modified_base 7: mod_base = OTHER; note = cytidine-3'-phosphate
  modified_base 8: mod_base = OTHER; note = guanosine-3'-phosphate
  modified_base 9: mod_base = OTHER; note = adenosine-3'-phosphate
  modified_base 10: mod_base = OTHER; note = uridine-3'-phosphate
  modified_base 11: mod_base = OTHER; note = cytidine-3'-phosphate
  modified_base 12: mod_base = OTHER; note = adenosine-3'-phosphate
  modified_base 13: mod_base = OTHER; note = adenosine-3'-phosphate
  modified_base 14: mod_base = OTHER; note = guanosine-3'-phosphate
  modified_base 15: mod_base = OTHER; note = guanosine-3'-phosphate
  modified_base 16: mod_base = OTHER; note = cytidine-3'-phosphate
  modified_base 17: mod_base = OTHER; note = uridine-3'-phosphate
  modified_base 18: mod_base = OTHER; note = adenosine-3'-phosphate
  modified_base 19: mod_base = OTHER; note = adenosine-3'-phosphate
  misc_feature 1..19: note = RNA
  misc_feature 20..21: note = DNA
tgtggacgatcaaggctaatt

SEQ ID NO: 1802 - DNA, 21 bp, synthetic construct
  source 1..21: mol_type = other DNA
  modified_base 1: mod_base = OTHER; note = cytidine-3'-phosphate
  modified_base 2: mod_base = OTHER; note = guanosine-3'-phosphate
  modified_base 3: mod_base = OTHER; note = adenosine-3'-phosphate
  modified_base 4: mod_base = OTHER; note = uridine-3'-phosphate
  modified_base 5: mod_base = OTHER; note = cytidine-3'-phosphate
  modified_base 6: mod_base = OTHER; note = adenosine-3'-phosphate
  modified_base 7: mod_base = OTHER; note = adenosine-3'-phosphate
  modified_base 8: mod_base = OTHER; note = guanosine-3'-phosphate
  modified_base 9: mod_base = OTHER; note = guanosine-3'-phosphate
  modified_base 10: mod_base = OTHER; note = cytidine-3'-phosphate
  modified_base 11: mod_base = OTHER; note = uridine-3'-phosphate
  modified_base 12: mod_base = OTHER; note = adenosine-3'-phosphate
  modified_base 13: mod_base = OTHER; note = adenosine-3'-phosphate
  modified_base 14: mod_base = OTHER; note = adenosine-3'-phosphate
  modified_base 15: mod_base = OTHER; note = uridine-3'-phosphate
  modified_base 16: mod_base = OTHER; note = adenosine-3'-phosphate
  modified_base 17: mod_base = OTHER; note = uridine-3'-phosphate
  modified_base 18: mod_base = OTHER; note = adenosine-3'-phosphate
  modified_base 19: mod_base = OTHER; note = adenosine-3'-phosphate
  misc_feature 1..19: note = RNA
  misc_feature 20..21: note = DNA
cgatcaaggctaaatataatt

SEQ ID NO: 1803 - DNA, 21 bp, synthetic construct
  source 1..21: mol_type = other DNA
  modified_base 1: mod_base = OTHER; note = adenosine-3'-phosphate
  modified_base 2: mod_base = OTHER; note = uridine-3'-phosphate
  modified_base 3: mod_base = OTHER; note = adenosine-3'-phosphate
  modified_base 4: mod_base = OTHER; note = uridine-3'-phosphate
  modified_base 5: mod_base = OTHER; note = adenosine-3'-phosphate
  modified_base 6: mod_base = OTHER; note = adenosine-3'-phosphate
  modified_base 7: mod_base = OTHER; note = adenosine-3'-phosphate
  modified_base 8: mod_base = OTHER; note = guanosine-3'-phosphate
  modified_base 9: mod_base = OTHER; note = adenosine-3'-phosphate
  modified_base 10: mod_base = OTHER; note = guanosine-3'-phosphate
  modified_base 11: mod_base = OTHER; note = guanosine-3'-phosphate
  modified_base 12: mod_base = OTHER; note = adenosine-3'-phosphate
  modified_base 13: mod_base = OTHER; note = cytidine-3'-phosphate
  modified_base 14: mod_base = OTHER; note = uridine-3'-phosphate
  modified_base 15: mod_base = OTHER; note = uridine-3'-phosphate
  modified_base 16: mod_base = OTHER; note = uridine-3'-phosphate
  modified_base 17: mod_base = OTHER; note = uridine-3'-phosphate
  modified_base 18: mod_base = OTHER; note = cytidine-3'-phosphate
  modified_base 19: mod_base = OTHER; note = adenosine-3'-phosphate
  misc_feature 1..19: note = RNA
  misc_feature 20..21: note = DNA
atataaagaggacttttcatt

SEQ ID NO: 1804 - DNA, 21 bp, synthetic construct
  source 1..21: mol_type = other DNA
  modified_base 1: mod_base = OTHER; note = guanosine-3'-phosphate
  modified_base 2: mod_base = OTHER; note = adenosine-3'-phosphate
  modified_base 3: mod_base = OTHER; note = guanosine-3'-phosphate
  modified_base 4: mod_base = OTHER; note = guanosine-3'-phosphate
  modified_base 5: mod_base = OTHER; note = adenosine-3'-phosphate
  modified_base 6: mod_base = OTHER; note = cytidine-3'-phosphate
  modified_base 7: mod_base = OTHER; note = uridine-3'-phosphate
  modified_base 8: mod_base = OTHER; note = uridine-3'-phosphate
  modified_base 9: mod_base = OTHER; note = uridine-3'-phosphate
  modified_base 10: mod_base = OTHER; note = uridine-3'-phosphate
  modified_base 11: mod_base = OTHER; note = cytidine-3'-phosphate
  modified_base 12: mod_base = OTHER; note = adenosine-3'-phosphate
  modified_base 13: mod_base = OTHER; note = adenosine-3'-phosphate
  modified_base 14: mod_base = OTHER; note = cytidine-3'-phosphate
  modified_base 15: mod_base = OTHER; note = adenosine-3'-phosphate
  modified_base 16: mod_base = OTHER; note = adenosine-3'-phosphate
  modified_base 17: mod_base = OTHER; note = cytidine-3'-phosphate
  modified_base 18: mod_base = OTHER; note = uridine-3'-phosphate
  modified_base 19: mod_base = OTHER; note = guanosine-3'-phosphate
  misc_feature 1..19: note = RNA
  misc_feature 20..21: note = DNA
gaggacttttcaacaactgtt

SEQ ID NO: 1805 - DNA, 21 bp, synthetic construct
  source 1..21: mol_type = other DNA
  modified_base 1: mod_base = OTHER; note = cytidine-3'-phosphate
  modified_base 2: mod_base = OTHER; note = adenosine-3'-phosphate
  modified_base 3: mod_base = OTHER; note = adenosine-3'-phosphate
  modified_base 4: mod_base = OTHER; note = cytidine-3'-phosphate
  modified_base 5: mod_base = OTHER; note = uridine-3'-phosphate
  modified_base 6: mod_base = OTHER; note = guanosine-3'-phosphate
  modified_base 7: mod_base = OTHER; note = guanosine-3'-phosphate
  modified_base 8: mod_base = OTHER; note = adenosine-3'-phosphate
  modified_base 9: mod_base = OTHER; note = adenosine-3'-phosphate
  modified_base 10: mod_base = OTHER; note = cytidine-3'-phosphate
  modified_base 11: mod_base = OTHER; note = cytidine-3'-phosphate
  modified_base 12: mod_base = OTHER; note = guanosine-3'-phosphate
  modified_base 13: mod_base = OTHER; note = cytidine-3'-phosphate
  modified_base 14: mod_base = OTHER; note = adenosine-3'-phosphate
  modified_base 15: mod_base = OTHER; note = uridine-3'-phosphate
  modified_base 16: mod_base = OTHER; note = adenosine-3'-phosphate
  modified_base 17: mod_base = OTHER; note = uridine-3'-phosphate
  modified_base 18: mod_base = OTHER; note = uridine-3'-phosphate
  modified_base 19: mod_base = OTHER; note = uridine-3'-phosphate
  misc_feature 1..19: note = RNA
  misc_feature 20..21: note = DNA
caactggaaccgcatattttt

SEQ ID NO: 1806 - DNA, 21 bp, synthetic construct
  source 1..21: mol_type = other DNA
  modified_base 1: mod_base = OTHER; note = cytidine-3'-phosphate
  modified_base 2: mod_base = OTHER; note = guanosine-3'-phosphate
  modified_base 3: mod_base = OTHER; note = cytidine-3'-phosphate
  modified_base 4: mod_base = OTHER; note = adenosine-3'-phosphate
  modified_base 5: mod_base = OTHER; note = uridine-3'-phosphate
  modified_base 6: mod_base = OTHER; note = adenosine-3'-phosphate
  modified_base 7: mod_base = OTHER; note = uridine-3'-phosphate
  modified_base 8: mod_base = OTHER; note = uridine-3'-phosphate
  modified_base 9: mod_base = OTHER; note = uridine-3'-phosphate
  modified_base 10: mod_base = OTHER; note = uridine-3'-phosphate
  modified_base 11: mod_base = OTHER; note = guanosine-3'-phosphate
  modified_base 12: mod_base = OTHER; note = adenosine-3'-phosphate
  modified_base 13: mod_base = OTHER; note = adenosine-3'-phosphate
  modified_base 14: mod_base = OTHER; note = guanosine-3'-phosphate
  modified_base 15: mod_base = OTHER; note = uridine-3'-phosphate
  modified_base 16: mod_base = OTHER; note = uridine-3'-phosphate
  modified_base 17: mod_base = OTHER; note = adenosine-3'-phosphate
  modified_base 18: mod_base = OTHER; note = adenosine-3'-phosphate
  modified_base 19: mod_base = OTHER; note = adenosine-3'-phosphate
  misc_feature 1..19: note = RNA
  misc_feature 20..21: note = DNA
cgcatattttgaagttaaatt

SEQ ID NO: 1807 - DNA, 21 bp, synthetic construct
  source 1..21: mol_type = other DNA
  modified_base 1: mod_base = OTHER; note = adenosine-3'-phosphate
  modified_base 2: mod_base = OTHER; note = adenosine-3'-phosphate
  modified_base 3: mod_base = OTHER; note = guanosine-3'-phosphate
  modified_base 4: mod_base = OTHER; note = uridine-3'-phosphate
  modified_base 5: mod_base = OTHER; note = uridine-3'-phosphate
  modified_base 6: mod_base = OTHER; note = adenosine-3'-phosphate
  modified_base 7: mod_base = OTHER; note = adenosine-3'-phosphate
  modified_base 8: mod_base = OTHER; note = adenosine-3'-phosphate
  modified_base 9: mod_base = OTHER; note = guanosine-3'-phosphate
  modified_base 10: mod_base = OTHER; note = adenosine-3'-phosphate
  modified_base 11: mod_base = OTHER; note = adenosine-3'-phosphate
  modified_base 12: mod_base = OTHER; note = uridine-3'-phosphate
  modified_base 13: mod_base = OTHER; note = adenosine-3'-phosphate
  modified_base 14: mod_base = OTHER; note = uridine-3'-phosphate
  modified_base 15: mod_base = OTHER; note = guanosine-3'-phosphate
  modified_base 16: mod_base = OTHER; note = uridine-3'-phosphate
  modified_base 17: mod_base = OTHER; note = cytidine-3'-phosphate
  modified_base 18: mod_base = OTHER; note = uridine-3'-phosphate
  modified_base 19: mod_base = OTHER; note = uridine-3'-phosphate
  misc_feature 1..19: note = RNA
  misc_feature 20..21: note = DNA
aagttaaagaatatgtctttt

SEQ ID NO: 1808 - DNA, 21 bp, synthetic construct
  source 1..21: mol_type = other DNA
  modified_base 1: mod_base = OTHER; note = guanosine-3'-phosphate
  modified_base 2: mod_base = OTHER; note = adenosine-3'-phosphate
  modified_base 3: mod_base = OTHER; note = adenosine-3'-phosphate
  modified_base 4: mod_base = OTHER; note = uridine-3'-phosphate
  modified_base 5: mod_base = OTHER; note = adenosine-3'-phosphate
  modified_base 6: mod_base = OTHER; note = uridine-3'-phosphate
  modified_base 7: mod_base = OTHER; note = guanosine-3'-phosphate
  modified_base 8: mod_base = OTHER; note = uridine-3'-phosphate
  modified_base 9: mod_base = OTHER; note = cytidine-3'-phosphate
  modified_base 10: mod_base = OTHER; note = uridine-3'-phosphate
  modified_base 11: mod_base = OTHER; note = uridine-3'-phosphate
  modified_base 12: mod_base = OTHER; note = guanosine-3'-phosphate
  modified_base 13: mod_base = OTHER; note = cytidine-3'-phosphate
  modified_base 14: mod_base = OTHER; note = cytidine-3'-phosphate
  modified_base 15: mod_base = OTHER; note = adenosine-3'-phosphate
  modified_base 16: mod_base = OTHER; note = cytidine-3'-phosphate
  modified_base 17: mod_base = OTHER; note = adenosine-3'-phosphate
  modified_base 18: mod_base = OTHER; note = uridine-3'-phosphate
  modified_base 19: mod_base = OTHER; note = uridine-3'-phosphate
  misc_feature 1..19: note = RNA
  misc_feature 20..21: note = DNA
gaatatgtcttgccacatttt

SEQ ID NO: 1809 - DNA, 21 bp, synthetic construct
  source 1..21: mol_type = other DNA
  modified_base 1: mod_base = OTHER; note = cytidine-3'-phosphate
  modified_base 2: mod_base = OTHER; note = cytidine-3'-phosphate
  modified_base 3: mod_base = OTHER; note = adenosine-3'-phosphate
  modified_base 4: mod_base = OTHER; note = cytidine-3'-phosphate
  modified_base 5: mod_base = OTHER; note = adenosine-3'-phosphate
  modified_base 6: mod_base = OTHER; note = uridine-3'-phosphate
  modified_base 7: mod_base = OTHER; note = uridine-3'-phosphate
  modified_base 8: mod_base = OTHER; note = uridine-3'-phosphate
  modified_base 9: mod_base = OTHER; note = uridine-3'-phosphate
  modified_base 10: mod_base = OTHER; note = uridine-3'-phosphate
  modified_base 11: mod_base = OTHER; note = cytidine-3'-phosphate
  modified_base 12: mod_base = OTHER; note = uridine-3'-phosphate
  modified_base 13: mod_base = OTHER; note = guanosine-3'-phosphate
  modified_base 14: mod_base = OTHER; note = uridine-3'-phosphate
  modified_base 15: mod_base = OTHER; note = cytidine-3'-phosphate
  modified_base 16: mod_base = OTHER; note = uridine-3'-phosphate
  modified_base 17: mod_base = OTHER; note = cytidine-3'-phosphate
  modified_base 18: mod_base = OTHER; note = adenosine-3'-phosphate
  modified_base 19: mod_base = OTHER; note = adenosine-3'-phosphate
  misc_feature 1..19: note = RNA
  misc_feature 20..21: note = DNA
ccacatttttctgtctcaatt

SEQ ID NO: 1810 - DNA, 21 bp, synthetic construct
  source 1..21: mol_type = other DNA
  modified_base 1: mod_base = OTHER; note = cytidine-3'-phosphate
  modified_base 2: mod_base = OTHER; note = uridine-3'-phosphate
  modified_base 3: mod_base = OTHER; note = guanosine-3'-phosphate
  modified_base 4: mod_base = OTHER; note = uridine-3'-phosphate
  modified_base 5: mod_base = OTHER; note = cytidine-3'-phosphate
  modified_base 6: mod_base = OTHER; note = uridine-3'-phosphate
  modified_base 7: mod_base = OTHER; note = cytidine-3'-phosphate
  modified_base 8: mod_base = OTHER; note = adenosine-3'-phosphate
  modified_base 9: mod_base = OTHER; note = adenosine-3'-phosphate
  modified_base 10: mod_base = OTHER; note = uridine-3'-phosphate
  modified_base 11: mod_base = OTHER; note = cytidine-3'-phosphate
  modified_base 12: mod_base = OTHER; note = guanosine-3'-phosphate
  modified_base 13: mod_base = OTHER; note = adenosine-3'-phosphate
  modified_base 14: mod_base = OTHER; note = guanosine-3'-phosphate
  modified_base 15: mod_base = OTHER; note = cytidine-3'-phosphate
  modified_base 16: mod_base = OTHER; note = cytidine-3'-phosphate
  modified_base 17: mod_base = OTHER; note = adenosine-3'-phosphate
  modified_base 18: mod_base = OTHER; note = guanosine-3'-phosphate
  modified_base 19: mod_base = OTHER; note = adenosine-3'-phosphate
  misc_feature 1..19: note = RNA
  misc_feature 20..21: note = DNA
ctgtctcaatcgagccagatt

SEQ ID NO: 1811 - DNA, 21 bp, synthetic construct
  source 1..21: mol_type = other DNA
  modified_base 1: mod_base = OTHER; note = cytidine-3'-phosphate
  modified_base 2: mod_base = OTHER; note = adenosine-3'-phosphate
  modified_base 3: mod_base = OTHER; note = adenosine-3'-phosphate
  modified_base 4: mod_base = OTHER; note = uridine-3'-phosphate
  modified_base 5: mod_base = OTHER; note = cytidine-3'-phosphate
  modified_base 6: mod_base = OTHER; note = guanosine-3'-phosphate
  modified_base 7: mod_base = OTHER; note = adenosine-3'-phosphate
  modified_base 8: mod_base = OTHER; note = guanosine-3'-phosphate
  modified_base 9: mod_base = OTHER; note = cytidine-3'-phosphate
  modified_base 10: mod_base = OTHER; note = cytidine-3'-phosphate
  modified_base 11: mod_base = OTHER; note = adenosine-3'-phosphate
  modified_base 12: mod_base = OTHER; note = guanosine-3'-phosphate
  modified_base 13: mod_base = OTHER; note = adenosine-3'-phosphate
  modified_base 14: mod_base = OTHER; note = adenosine-3'-phosphate
  modified_base 15: mod_base = OTHER; note = uridine-3'-phosphate
  modified_base 16: mod_base = OTHER; note = adenosine-3'-phosphate
  modified_base 17: mod_base = OTHER; note = uridine-3'-phosphate
  modified_base 18: mod_base = OTHER; note = adenosine-3'-phosphate
  modified_base 19: mod_base = OTHER; note = adenosine-3'-phosphate
  misc_feature 1..19: note = RNA
  misc_feature 20..21: note = DNA
caatcgagccagaatataatt

SEQ ID NO: 1812 - DNA, 21 bp, synthetic construct
  source 1..21: mol_type = other DNA
  modified_base 1: mod_base = OTHER; note = guanosine-3'-phosphate
  modified_base 2: mod_base = OTHER; note = adenosine-3'-phosphate
  modified_base 3: mod_base = OTHER; note = adenosine-3'-phosphate
  modified_base 4: mod_base = OTHER; note = uridine-3'-phosphate
  modified_base 5: mod_base = OTHER; note = adenosine-3'-phosphate
  modified_base 6: mod_base = OTHER; note = uridine-3'-phosphate
  modified_base 7: mod_base = OTHER; note = adenosine-3'-phosphate
  modified_base 8: mod_base = OTHER; note = adenosine-3'-phosphate
  modified_base 9: mod_base = OTHER; note = uridine-3'-phosphate
  modified_base 10: mod_base = OTHER; note = uridine-3'-phosphate
  modified_base 11: mod_base = OTHER; note = uridine-3'-phosphate
  modified_base 12: mod_base = OTHER; note = cytidine-3'-phosphate
  modified_base 13: mod_base = OTHER; note = adenosine-3'-phosphate
  modified_base 14: mod_base = OTHER; note = uridine-3'-phosphate
  modified_base 15: mod_base = OTHER; note = uridine-3'-phosphate
  modified_base 16: mod_base = OTHER; note = guanosine-3'-phosphate
  modified_base 17: mod_base = OTHER; note = guanosine-3'-phosphate
  modified_base 18: mod_base = OTHER; note = uridine-3'-phosphate
  modified_base 19: mod_base = OTHER; note = uridine-3'-phosphate
  misc_feature 1..19: note = RNA
  misc_feature 20..21: note = DNA
gaatataatttcattggtttt

SEQ ID NO: 1813 - DNA, 21 bp, synthetic construct
  source 1..21: mol_type = other DNA
  modified_base 1: mod_base = OTHER; note = adenosine-3'-phosphate
  modified_base 2: mod_base = OTHER; note = uridine-3'-phosphate
  modified_base 3: mod_base = OTHER; note = uridine-3'-phosphate
  modified_base 4: mod_base = OTHER; note = guanosine-3'-phosphate
  modified_base 5: mod_base = OTHER; note = guanosine-3'-phosphate
  modified_base 6: mod_base = OTHER; note = uridine-3'-phosphate
  modified_base 7: mod_base = OTHER; note = uridine-3'-phosphate
  modified_base 8: mod_base = OTHER; note = adenosine-3'-phosphate
  modified_base 9: mod_base = OTHER; note = cytidine-3'-phosphate
  modified_base 10: mod_base = OTHER; note = adenosine-3'-phosphate
  modified_base 11: mod_base = OTHER; note = adenosine-3'-phosphate
  modified_base 12: mod_base = OTHER; note = guanosine-3'-phosphate
  modified_base 13: mod_base = OTHER; note = adenosine-3'-phosphate
  modified_base 14: mod_base = OTHER; note = adenosine-3'-phosphate
  modified_base 15: mod_base = OTHER; note = cytidine-3'-phosphate
  modified_base 16: mod_base = OTHER; note = uridine-3'-phosphate
  modified_base 17: mod_base = OTHER; note = uridine-3'-phosphate
  modified_base 18: mod_base = OTHER; note = uridine-3'-phosphate
  modified_base 19: mod_base = OTHER; note = adenosine-3'-phosphate
  misc_feature 1..19: note = RNA
  misc_feature 20..21: note = DNA
attggttacaagaactttatt

SEQ ID NO: 1814 - DNA, 21 bp, synthetic construct
  source 1..21: mol_type = other DNA
  modified_base 1: mod_base = OTHER; note = adenosine-3'-phosphate
  modified_base 2: mod_base = OTHER; note = guanosine-3'-phosphate
  modified_base 3: mod_base = OTHER; note = adenosine-3'-phosphate
  modified_base 4: mod_base = OTHER; note = adenosine-3'-phosphate
  modified_base 5: mod_base = OTHER; note = cytidine-3'-phosphate
  modified_base 6: mod_base = OTHER; note = uridine-3'-phosphate
  modified_base 7: mod_base = OTHER; note = uridine-3'-phosphate
  modified_base 8: mod_base = OTHER; note = uridine-3'-phosphate
  modified_base 9: mod_base = OTHER; note = adenosine-3'-phosphate
  modified_base 10: mod_base = OTHER; note = adenosine-3'-phosphate
  modified_base 11: mod_base = OTHER; note = guanosine-3'-phosphate
  modified_base 12: mod_base = OTHER; note = adenosine-3'-phosphate
  modified_base 13: mod_base = OTHER; note = adenosine-3'-phosphate
  modified_base 14: mod_base = OTHER; note = uridine-3'-phosphate
  modified_base 15: mod_base = OTHER; note = uridine-3'-phosphate
  modified_base 16: mod_base = OTHER; note = uridine-3'-phosphate
  modified_base 17: mod_base = OTHER; note = uridine-3'-phosphate
  modified_base 18: mod_base = OTHER; note = guanosine-3'-phosphate
  modified_base 19: mod_base = OTHER; note = adenosine-3'-phosphate
  misc_feature 1..19: note = RNA
  misc_feature 20..21: note = DNA
agaactttaagaattttgatt

SEQ ID NO: 1815 - DNA, 21 bp, synthetic construct
  source 1..21: mol_type = other DNA
  modified_base 1: mod_base = OTHER; note = guanosine-3'-phosphate
  modified_base 2: mod_base = OTHER; note = adenosine-3'-phosphate
  modified_base 3: mod_base = OTHER; note = adenosine-3'-phosphate
  modified_base 4: mod_base = OTHER; note = uridine-3'-phosphate
  modified_base 5: mod_base = OTHER; note = uridine-3'-phosphate
  modified_base 6: mod_base = OTHER; note = uridine-3'-phosphate
  modified_base 7: mod_base = OTHER; note = uridine-3'-phosphate
  modified_base 8: mod_base = OTHER; note = guanosine-3'-phosphate
  modified_base 9: mod_base = OTHER; note = adenosine-3'-phosphate
  modified_base 10: mod_base = OTHER; note = adenosine-3'-phosphate
  modified_base 11: mod_base = OTHER; note = adenosine-3'-phosphate
  modified_base 12: mod_base = OTHER; note = uridine-3'-phosphate
  modified_base 13: mod_base = OTHER; note = uridine-3'-phosphate
  modified_base 14: mod_base = OTHER; note = adenosine-3'-phosphate
  modified_base 15: mod_base = OTHER; note = cytidine-3'-phosphate
  modified_base 16: mod_base = OTHER; note = uridine-3'-phosphate
  modified_base 17: mod_base = OTHER; note = adenosine-3'-phosphate
  modified_base 18: mod_base = OTHER; note = uridine-3'-phosphate
  modified_base 19: mod_base = OTHER; note = adenosine-3'-phosphate
  misc_feature 1..19: note = RNA
  misc_feature 20..21: note = DNA
gaattttgaaattactatatt

SEQ ID NO: 1816 - DNA, 21 bp, synthetic construct
  source 1..21: mol_type = other DNA
  modified_base 1: mod_base = OTHER; note = guanosine-3'-phosphate
  modified_base 2: mod_base = OTHER; note = adenosine-3'-phosphate
  modified_base 3: mod_base = OTHER; note = adenosine-3'-phosphate
  modified_base 4: mod_base = OTHER; note = adenosine-3'-phosphate
  modified_base 5: mod_base = OTHER; note = uridine-3'-phosphate
  modified_base 6: mod_base = OTHER; note = uridine-3'-phosphate
  modified_base 7: mod_base = OTHER; note = adenosine-3'-phosphate
  modified_base 8: mod_base = OTHER; note = cytidine-3'-phosphate
  modified_base 9: mod_base = OTHER; note = uridine-3'-phosphate
  modified_base 10: mod_base = OTHER; note = adenosine-3'-phosphate
  modified_base 11: mod_base = OTHER; note = uridine-3'-phosphate
  modified_base 12: mod_base = OTHER; note = adenosine-3'-phosphate
  modified_base 13: mod_base = OTHER; note = adenosine-3'-phosphate
  modified_base 14: mod_base = OTHER; note = adenosine-3'-phosphate
  modified_base 15: mod_base = OTHER; note = adenosine-3'-phosphate
  modified_base 16: mod_base = OTHER; note = guanosine-3'-phosphate
  modified_base 17: mod_base = OTHER; note = cytidine-3'-phosphate
  modified_base 18: mod_base = OTHER; note = adenosine-3'-phosphate
  modified_base 19: mod_base = OTHER; note = adenosine-3'-phosphate
  misc_feature 1..19: note = RNA
  misc_feature 20..21: note = DNA
gaaattactataaaagcaatt

SEQ ID NO: 1817 - DNA, 21 bp, synthetic construct
  source 1..21: mol_type = other DNA
  modified_base 1: mod_base = OTHER; note = adenosine-3'-phosphate
  modified_base 2: mod_base = OTHER; note = adenosine-3'-phosphate
  modified_base 3: mod_base = OTHER; note = adenosine-3'-phosphate
  modified_base 4: mod_base = OTHER; note = guanosine-3'-phosphate
  modified_base 5: mod_base = OTHER; note = cytidine-3'-phosphate
  modified_base 6: mod_base = OTHER; note = adenosine-3'-phosphate
  modified_base 7: mod_base = OTHER; note = adenosine-3'-phosphate
  modified_base 8: mod_base = OTHER; note = guanosine-3'-phosphate
  modified_base 9: mod_base = OTHER; note = adenosine-3'-phosphate
  modified_base 10: mod_base = OTHER; note = uridine-3'-phosphate
  modified_base 11: mod_base = OTHER; note = adenosine-3'-phosphate
  modified_base 12: mod_base = OTHER; note = uridine-3'-phosphate
  modified_base 13: mod_base = OTHER; note = uridine-3'-phosphate
  modified_base 14: mod_base = OTHER; note = uridine-3'-phosphate
  modified_base 15: mod_base = OTHER; note = uridine-3'-phosphate
  modified_base 16: mod_base = OTHER; note = uridine-3'-phosphate
  modified_base 17: mod_base = OTHER; note = adenosine-3'-phosphate
  modified_base 18: mod_base = OTHER; note = uridine-3'-phosphate
  modified_base 19: mod_base = OTHER; note = adenosine-3'-phosphate
  misc_feature 1..19: note = RNA
  misc_feature 20..21: note = DNA
aaagcaagatatttttatatt

SEQ ID NO: 1818 - DNA, 21 bp, synthetic construct
  source 1..21: mol_type = other DNA
  modified_base 1: mod_base = OTHER; note = adenosine-3'-phosphate
  modified_base 2: mod_base = OTHER; note = uridine-3'-phosphate
  modified_base 3: mod_base = OTHER; note = adenosine-3'-phosphate
  modified_base 4: mod_base = OTHER; note = uridine-3'-phosphate
  modified_base 5: mod_base = OTHER; note = uridine-3'-phosphate
  modified_base 6: mod_base = OTHER; note = uridine-3'-phosphate
  modified_base 7: mod_base = OTHER; note = uridine-3'-phosphate
  modified_base 8: mod_base = OTHER; note = uridine-3'-phosphate
  modified_base 9: mod_base = OTHER; note = adenosine-3'-phosphate
  modified_base 10: mod_base = OTHER; note = uridine-3'-phosphate
  modified_base 11: mod_base = OTHER; note = adenosine-3'-phosphate
  modified_base 12: mod_base = OTHER; note = adenosine-3'-phosphate
  modified_base 13: mod_base = OTHER; note = uridine-3'-phosphate
  modified_base 14: mod_base = OTHER; note = adenosine-3'-phosphate
  modified_base 15: mod_base = OTHER; note = adenosine-3'-phosphate
  modified_base 16: mod_base = OTHER; note = adenosine-3'-phosphate
  modified_base 17: mod_base = OTHER; note = guanosine-3'-phosphate
  modified_base 18: mod_base = OTHER; note = uridine-3'-phosphate
  modified_base 19: mod_base = OTHER; note = adenosine-3'-phosphate
  misc_feature 1..19: note = RNA
  misc_feature 20..21: note = DNA
atatttttataataaagtatt

SEQ ID NO: 1819 - DNA, 21 bp, synthetic construct
  source 1..21: mol_type = other DNA
  modified_base 1: mod_base = OTHER; note = adenosine-3'-phosphate
  modified_base 2: mod_base = OTHER; note = adenosine-3'-phosphate
  modified_base 3: mod_base = OTHER; note = guanosine-3'-phosphate
  modified_base 4: mod_base = OTHER; note = uridine-3'-phosphate
  modified_base 5: mod_base = OTHER; note = adenosine-3'-phosphate
  modified_base 6: mod_base = OTHER; note = guanosine-3'-phosphate
  modified_base 7: mod_base = OTHER; note = uridine-3'-phosphate
  modified_base 8: mod_base = OTHER; note = cytidine-3'-phosphate
  modified_base 9: mod_base = OTHER; note = adenosine-3'-phosphate
  modified_base 10: mod_base = OTHER; note = cytidine-3'-phosphate
  modified_base 11: mod_base = OTHER; note = uridine-3'-phosphate
  modified_base 12: mod_base = OTHER; note = guanosine-3'-phosphate
  modified_base 13: mod_base = OTHER; note = adenosine-3'-phosphate
  modified_base 14: mod_base = OTHER; note = guanosine-3'-phosphate
  modified_base 15: mod_base = OTHER; note = guanosine-3'-phosphate
  modified_base 16: mod_base = OTHER; note = cytidine-3'-phosphate
  modified_base 17: mod_base = OTHER; note = uridine-3'-phosphate
  modified_base 18: mod_base = OTHER; note = guanosine-3'-phosphate
  modified_base 19: mod_base = OTHER; note = adenosine-3'-phosphate
  misc_feature 1..19: note = RNA
  misc_feature 20..21: note = DNA
aagtagtcactgaggctgatt

SEQ ID NO: 1820 - DNA, 21 bp, synthetic construct
  source 1..21: mol_type = other DNA
  modified_base 1: mod_base = OTHER; note = cytidine-3'-phosphate
  modified_base 2: mod_base = OTHER; note = adenosine-3'-phosphate
  modified_base 3: mod_base = OTHER; note = cytidine-3'-phosphate
  modified_base 4: mod_base = OTHER; note = uridine-3'-phosphate
  modified_base 5: mod_base = OTHER; note = guanosine-3'-phosphate
  modified_base 6: mod_base = OTHER; note = adenosine-3'-phosphate
  modified_base 7: mod_base = OTHER; note = guanosine-3'-phosphate
  modified_base 8: mod_base = OTHER; note = guanosine-3'-phosphate
  modified_base 9: mod_base = OTHER; note = cytidine-3'-phosphate
  modified_base 10: mod_base = OTHER; note = uridine-3'-phosphate
  modified_base 11: mod_base = OTHER; note = guanosine-3'-phosphate
  modified_base 12: mod_base = OTHER; note = adenosine-3'-phosphate
  modified_base 13: mod_base = OTHER; note = cytidine-3'-phosphate
  modified_base 14: mod_base = OTHER; note = guanosine-3'-phosphate
  modified_base 15: mod_base = OTHER; note = uridine-3'-phosphate
  modified_base 16: mod_base = OTHER; note = uridine-3'-phosphate
  modified_base 17: mod_base = OTHER; note = uridine-3'-phosphate
  modified_base 18: mod_base = OTHER; note = adenosine-3'-phosphate
  modified_base 19: mod_base = OTHER; note = uridine-3'-phosphate
  misc_feature 1..19: note = RNA
  misc_feature 20..21: note = DNA
cactgaggctgacgtttattt

SEQ ID NO: 1821 - DNA, 21 bp, synthetic construct
  source 1..21: mol_type = other DNA
  modified_base 1: mod_base = OTHER; note = cytidine-3'-phosphate
  modified_base 2: mod_base = OTHER; note = guanosine-3'-phosphate
  modified_base 3: mod_base = OTHER; note = uridine-3'-phosphate
  modified_base 4: mod_base = OTHER; note = uridine-3'-phosphate
  modified_base 5: mod_base = OTHER; note = uridine-3'-phosphate
  modified_base 6: mod_base = OTHER; note = adenosine-3'-phosphate
  modified_base 7: mod_base = OTHER; note = uridine-3'-phosphate
  modified_base 8: mod_base = OTHER; note = adenosine-3'-phosphate
  modified_base 9: mod_base = OTHER; note = uridine-3'-phosphate
  modified_base 10: mod_base = OTHER; note = cytidine-3'-phosphate
  modified_base 11: mod_base = OTHER; note = adenosine-3'-phosphate
  modified_base 12: mod_base = OTHER; note = cytidine-3'-phosphate
  modified_base 13: mod_base = OTHER; note = adenosine-3'-phosphate
  modified_base 14: mod_base = OTHER; note = uridine-3'-phosphate
  modified_base 15: mod_base = OTHER; note = uridine-3'-phosphate
  modified_base 16: mod_base = OTHER; note = uridine-3'-phosphate
  modified_base 17: mod_base = OTHER; note = guanosine-3'-phosphate
  modified_base 18: mod_base = OTHER; note = guanosine-3'-phosphate
  modified_base 19: mod_base = OTHER; note = adenosine-3'-phosphate
  misc_feature 1..19: note = RNA
  misc_feature 20..21: note = DNA
cgtttatatcacatttggatt

SEQ ID NO: 1822 - DNA, 21 bp, synthetic construct
  source 1..21: mol_type = other DNA
  modified_base 1: mod_base = OTHER; note = cytidine-3'-phosphate
  modified_base 2: mod_base = OTHER; note = adenosine-3'-phosphate
  modified_base 3: mod_base = OTHER; note = cytidine-3'-phosphate
  modified_base 4: mod_base = OTHER; note = adenosine-3'-phosphate
  modified_base 5: mod_base = OTHER; note = uridine-3'-phosphate
  modified_base 6: mod_base = OTHER; note = uridine-3'-phosphate
  modified_base 7: mod_base = OTHER; note = uridine-3'-phosphate
  modified_base 8: mod_base = OTHER; note = guanosine-3'-phosphate
  modified_base 9: mod_base = OTHER; note = guanosine-3'-phosphate
  modified_base 10: mod_base = OTHER; note = adenosine-3'-phosphate
  modified_base 11: mod_base = OTHER; note = adenosine-3'-phosphate
  modified_base 12: mod_base = OTHER; note = uridine-3'-phosphate
  modified_base 13: mod_base = OTHER; note = adenosine-3'-phosphate
  modified_base 14: mod_base = OTHER; note = adenosine-3'-phosphate
  modified_base 15: mod_base = OTHER; note = guanosine-3'-phosphate
  modified_base 16: mod_base = OTHER; note = adenosine-3'-phosphate
  modified_base 17: mod_base = OTHER; note = guanosine-3'-phosphate
  modified_base 18: mod_base = OTHER; note = adenosine-3'-phosphate
  modified_base 19: mod_base = OTHER; note = adenosine-3'-phosphate
  misc_feature 1..19: note = RNA
  misc_feature 20..21: note = DNA
cacatttggaataagagaatt

SEQ ID NO: 1823 - DNA, 21 bp, synthetic construct
  source 1..21: mol_type = other DNA
  modified_base 1: mod_base = OTHER; note = adenosine-3'-phosphate
  modified_base 2: mod_base = OTHER; note = adenosine-3'-phosphate
  modified_base 3: mod_base = OTHER; note = uridine-3'-phosphate
  modified_base 4: mod_base = OTHER; note = adenosine-3'-phosphate
  modified_base 5: mod_base = OTHER; note = adenosine-3'-phosphate
  modified_base 6: mod_base = OTHER; note = guanosine-3'-phosphate
  modified_base 7: mod_base = OTHER; note = adenosine-3'-phosphate
  modified_base 8: mod_base = OTHER; note = guanosine-3'-phosphate
  modified_base 9: mod_base = OTHER; note = adenosine-3'-phosphate
  modified_base 10: mod_base = OTHER; note = adenosine-3'-phosphate
  modified_base 11: mod_base = OTHER; note = guanosine-3'-phosphate
  modified_base 12: mod_base = OTHER; note = adenosine-3'-phosphate
  modified_base 13: mod_base = OTHER; note = cytidine-3'-phosphate
  modified_base 14: mod_base = OTHER; note = uridine-3'-phosphate
  modified_base 15: mod_base = OTHER; note = uridine-3'-phosphate
  modified_base 16: mod_base = OTHER; note = adenosine-3'-phosphate
  modified_base 17: mod_base = OTHER; note = adenosine-3'-phosphate
  modified_base 18: mod_base = OTHER; note = adenosine-3'-phosphate
  modified_base 19: mod_base = OTHER; note = adenosine-3'-phosphate
  misc_feature 1..19: note = RNA
  misc_feature 20..21: note = DNA
aataagagaagacttaaaatt

SEQ ID NO: 1824 - DNA, 21 bp, synthetic construct
  source 1..21: mol_type = other DNA
  modified_base 1: mod_base = OTHER; note = cytidine-3'-phosphate
  modified_base 2: mod_base = OTHER; note = uridine-3'-phosphate
  modified_base 3: mod_base = OTHER; note = uridine-3'-phosphate
  modified_base 4: mod_base = OTHER; note = adenosine-3'-phosphate
  modified_base 5: mod_base = OTHER; note = adenosine-3'-phosphate
  modified_base 6: mod_base = OTHER; note = adenosine-3'-phosphate
  modified_base 7: mod_base = OTHER; note = adenosine-3'-phosphate
  modified_base 8: mod_base = OTHER; note = guanosine-3'-phosphate
  modified_base 9: mod_base = OTHER; note = adenosine-3'-phosphate
  modified_base 10: mod_base = OTHER; note = uridine-3'-phosphate
  modified_base 11: mod_base = OTHER; note = guanosine-3'-phosphate
  modified_base 12: mod_base = OTHER; note = adenosine-3'-phosphate
  modified_base 13: mod_base = OTHER; note = uridine-3'-phosphate
  modified_base 14: mod_base = OTHER; note = cytidine-3'-phosphate
  modified_base 15: mod_base = OTHER; note = adenosine-3'-phosphate
  modified_base 16: mod_base = OTHER; note = adenosine-3'-phosphate
  modified_base 17: mod_base = OTHER; note = adenosine-3'-phosphate
  modified_base 18: mod_base = OTHER; note = adenosine-3'-phosphate
  modified_base 19: mod_base = OTHER; note = adenosine-3'-phosphate
  misc_feature 1..19: note = RNA
  misc_feature 20..21: note = DNA
cttaaaagatgatcaaaaatt

SEQ ID NO: 1825 - DNA, 21 bp, synthetic construct
  source 1..21: mol_type = other DNA
  modified_base 1: mod_base = OTHER; note = guanosine-3'-phosphate
  modified_base 2: mod_base = OTHER; note = adenosine-3'-phosphate
  modified_base 3: mod_base = OTHER; note = uridine-3'-phosphate
  modified_base 4: mod_base = OTHER; note = guanosine-3'-phosphate
  modified_base 5: mod_base = OTHER; note = adenosine-3'-phosphate
  modified_base 6: mod_base = OTHER; note = uridine-3'-phosphate
  modified_base 7: mod_base = OTHER; note = cytidine-3'-phosphate
  modified_base 8: mod_base = OTHER; note = adenosine-3'-phosphate
  modified_base 9: mod_base = OTHER; note = adenosine-3'-phosphate
  modified_base 10: mod_base = OTHER; note = adenosine-3'-phosphate
  modified_base 11: mod_base = OTHER; note = adenosine-3'-phosphate
  modified_base 12: mod_base = OTHER; note = adenosine-3'-phosphate
  modified_base 13: mod_base = OTHER; note = guanosine-3'-phosphate
  modified_base 14: mod_base = OTHER; note = adenosine-3'-phosphate
  modified_base 15: mod_base = OTHER; note = adenosine-3'-phosphate
  modified_base 16: mod_base = OTHER; note = adenosine-3'-phosphate
  modified_base 17: mod_base = OTHER; note = uridine-3'-phosphate
  modified_base 18: mod_base = OTHER; note = guanosine-3'-phosphate
  modified_base 19: mod_base = OTHER; note = adenosine-3'-phosphate
  misc_feature 1..19: note = RNA
  misc_feature 20..21: note = DNA
gatgatcaaaaagaaatgatt

SEQ ID NO: 1826 - DNA, 21 bp, synthetic construct
  source 1..21: mol_type = other DNA
  modified_base 1: mod_base = OTHER; note = adenosine-3'-phosphate
  modified_base 2: mod_base = OTHER; note = adenosine-3'-phosphate
  modified_base 3: mod_base = OTHER; note = adenosine-3'-phosphate
  modified_base 4: mod_base = OTHER; note = uridine-3'-phosphate
  modified_base 5: mod_base = OTHER; note = guanosine-3'-phosphate
  modified_base 6: mod_base = OTHER; note = adenosine-3'-phosphate
  modified_base 7: mod_base = OTHER; note = uridine-3'-phosphate
  modified_base 8: mod_base = OTHER; note = guanosine-3'-phosphate
  modified_base 9: mod_base = OTHER; note = cytidine-3'-phosphate
  modified_base 10: mod_base = OTHER; note = adenosine-3'-phosphate
  modified_base 11: mod_base = OTHER; note = adenosine-3'-phosphate
  modified_base 12: mod_base = OTHER; note = adenosine-3'-phosphate
  modified_base 13: mod_base = OTHER; note = cytidine-3'-phosphate
  modified_base 14: mod_base = OTHER; note = adenosine-3'-phosphate
  modified_base 15: mod_base = OTHER; note = guanosine-3'-phosphate
  modified_base 16: mod_base = OTHER; note = cytidine-3'-phosphate
  modified_base 17: mod_base = OTHER; note = adenosine-3'-phosphate
  modified_base 18: mod_base = OTHER; note = adenosine-3'-phosphate
  modified_base 19: mod_base = OTHER; note = uridine-3'-phosphate
  misc_feature 1..19: note = RNA
  misc_feature 20..21: note = DNA
aaatgatgcaaacagcaattt

SEQ ID NO: 1827 - DNA, 21 bp, synthetic construct
  source 1..21: mol_type = other DNA
  modified_base 1: mod_base = OTHER; note = adenosine-3'-phosphate
  modified_base 2: mod_base = OTHER; note = cytidine-3'-phosphate
  modified_base 3: mod_base = OTHER; note = adenosine-3'-phosphate
  modified_base 4: mod_base = OTHER; note = guanosine-3'-phosphate
  modified_base 5: mod_base = OTHER; note = cytidine-3'-phosphate
  modified_base 6: mod_base = OTHER; note = adenosine-3'-phosphate
  modified_base 7: mod_base = OTHER; note = adenosine-3'-phosphate
  modified_base 8: mod_base = OTHER; note = uridine-3'-phosphate
  modified_base 9: mod_base = OTHER; note = guanosine-3'-phosphate
  modified_base 10: mod_base = OTHER; note = cytidine-3'-phosphate
  modified_base 11: mod_base = OTHER; note = adenosine-3'-phosphate
  modified_base 12: mod_base = OTHER; note = adenosine-3'-phosphate
  modified_base 13: mod_base = OTHER; note = adenosine-3'-phosphate
  modified_base 14: mod_base = OTHER; note = adenosine-3'-phosphate
  modified_base 15: mod_base = OTHER; note = cytidine-3'-phosphate
  modified_base 16: mod_base = OTHER; note = adenosine-3'-phosphate
  modified_base 17: mod_base = OTHER; note = cytidine-3'-phosphate
  modified_base 18: mod_base = OTHER; note = adenosine-3'-phosphate
  modified_base 19: mod_base = OTHER; note = adenosine-3'-phosphate
  misc_feature 1..19: note = RNA
  misc_feature 20..21: note = DNA
acagcaatgcaaaacacaatt

SEQ ID NO: 1828 - DNA, 21 bp, synthetic construct
  source 1..21: mol_type = other DNA
  modified_base 1: mod_base = OTHER; note = adenosine-3'-phosphate
  modified_base 2: mod_base = OTHER; note = adenosine-3'-phosphate
  modified_base 3: mod_base = OTHER; note = adenosine-3'-phosphate
  modified_base 4: mod_base = OTHER; note = adenosine-3'-phosphate
  modified_base 5: mod_base = OTHER; note = cytidine-3'-phosphate
  modified_base 6: mod_base = OTHER; note = adenosine-3'-phosphate
  modified_base 7: mod_base = OTHER; note = cytidine-3'-phosphate
  modified_base 8: mod_base = OTHER; note = adenosine-3'-phosphate
  modified_base 9: mod_base = OTHER; note = adenosine-3'-phosphate
  modified_base 10: mod_base = OTHER; note = uridine-3'-phosphate
  modified_base 11: mod_base = OTHER; note = guanosine-3'-phosphate
  modified_base 12: mod_base = OTHER; note = uridine-3'-phosphate
  modified_base 13: mod_base = OTHER; note = uridine-3'-phosphate
  modified_base 14: mod_base = OTHER; note = guanosine-3'-phosphate
  modified_base 15: mod_base = OTHER; note = adenosine-3'-phosphate
  modified_base 16: mod_base = OTHER; note = uridine-3'-phosphate
  modified_base 17: mod_base = OTHER; note = adenosine-3'-phosphate
  modified_base 18: mod_base = OTHER; note = adenosine-3'-phosphate
  modified_base 19: mod_base = OTHER; note = adenosine-3'-phosphate
  misc_feature 1..19: note = RNA
  misc_feature 20..21: note = DNA
aaaacacaatgttgataaatt

SEQ ID NO: 1829 - DNA, 21 bp, synthetic construct
  source 1..21: mol_type = other DNA
  modified_base 1: mod_base = OTHER; note = cytidine-3'-phosphate
  modified_base 2: mod_base = OTHER; note = adenosine-3'-phosphate
  modified_base 3: mod_base = OTHER; note = adenosine-3'-phosphate
  modified_base 4: mod_base = OTHER; note = uridine-3'-phosphate
  modified_base 5: mod_base = OTHER; note = guanosine-3'-phosphate
  modified_base 6: mod_base = OTHER; note = uridine-3'-phosphate
  modified_base 7: mod_base = OTHER; note = uridine-3'-phosphate
  modified_base 8: mod_base = OTHER; note = guanosine-3'-phosphate
  modified_base 9: mod_base = OTHER; note = adenosine-3'-phosphate
  modified_base 10: mod_base = OTHER; note = uridine-3'-phosphate
  modified_base 11: mod_base = OTHER; note = adenosine-3'-phosphate
  modified_base 12: mod_base = OTHER; note = adenosine-3'-phosphate
  modified_base 13: mod_base = OTHER; note = adenosine-3'-phosphate
  modified_base 14: mod_base = OTHER; note = uridine-3'-phosphate
  modified_base 15: mod_base = OTHER; note = guanosine-3'-phosphate
  modified_base 16: mod_base = OTHER; note = guanosine-3'-phosphate
  modified_base 17: mod_base = OTHER; note = adenosine-3'-phosphate
  modified_base 18: mod_base = OTHER; note = adenosine-3'-phosphate
  modified_base 19: mod_base = OTHER; note = uridine-3'-phosphate
  misc_feature 1..19: note = RNA
  misc_feature 20..21: note = DNA
caatgttgataaatggaattt

SEQ ID NO: 1830 - DNA, 21 bp, synthetic construct
  source 1..21: mol_type = other DNA
  modified_base 1: mod_base = OTHER; note = guanosine-3'-phosphate
  modified_base 2: mod_base = OTHER; note = guanosine-3'-phosphate
  modified_base 3: mod_base = OTHER; note = adenosine-3'-phosphate
  modified_base 4: mod_base = OTHER; note = adenosine-3'-phosphate
  modified_base 5: mod_base = OTHER; note = uridine-3'-phosphate
  modified_base 6: mod_base = OTHER; note = uridine-3'-phosphate
  modified_base 7: mod_base = OTHER; note = guanosine-3'-phosphate
  modified_base 8: mod_base = OTHER; note = cytidine-3'-phosphate
  modified_base 9: mod_base = OTHER; note = uridine-3'-phosphate
  modified_base 10: mod_base = OTHER; note = cytidine-3'-phosphate
  modified_base 11: mod_base = OTHER; note = adenosine-3'-phosphate
  modified_base 12: mod_base = OTHER; note = adenosine-3'-phosphate
  modified_base 13: mod_base = OTHER; note = guanosine-3'-phosphate
  modified_base 14: mod_base = OTHER; note = uridine-3'-phosphate
  modified_base 15: mod_base = OTHER; note = cytidine-3'-phosphate
  modified_base 16: mod_base = OTHER; note = adenosine-3'-phosphate
  modified_base 17: mod_base = OTHER; note = cytidine-3'-phosphate
  modified_base 18: mod_base = OTHER; note = adenosine-3'-phosphate
  modified_base 19: mod_base = OTHER; note = uridine-3'-phosphate
  misc_feature 1..19: note = RNA
  misc_feature 20..21: note = DNA
ggaattgctcaagtcacattt

SEQ ID NO: 1831 - DNA, 21 bp, synthetic construct
  source 1..21: mol_type = other DNA
  modified_base 1: mod_base = OTHER; note = guanosine-3'-phosphate
  modified_base 2: mod_base = OTHER; note = cytidine-3'-phosphate
  modified_base 3: mod_base = OTHER; note = uridine-3'-phosphate
  modified_base 4: mod_base = OTHER; note = cytidine-3'-phosphate
  modified_base 5: mod_base = OTHER; note = adenosine-3'-phosphate
  modified_base 6: mod_base = OTHER; note = adenosine-3'-phosphate
  modified_base 7: mod_base = OTHER; note = guanosine-3'-phosphate
  modified_base 8: mod_base = OTHER; note = uridine-3'-phosphate
  modified_base 9: mod_base = OTHER; note = cytidine-3'-phosphate
  modified_base 10: mod_base = OTHER; note = adenosine-3'-phosphate
  modified_base 11: mod_base = OTHER; note = cytidine-3'-phosphate
  modified_base 12: mod_base = OTHER; note = adenosine-3'-phosphate
  modified_base 13: mod_base = OTHER; note = uridine-3'-phosphate
  modified_base 14: mod_base = OTHER; note = uridine-3'-phosphate
  modified_base 15: mod_base = OTHER; note = uridine-3'-phosphate
  modified_base 16: mod_base = OTHER; note = guanosine-3'-phosphate
  modified_base 17: mod_base = OTHER; note = adenosine-3'-phosphate
  modified_base 18: mod_base = OTHER; note = uridine-3'-phosphate
  modified_base 19: mod_base = OTHER; note = uridine-3'-phosphate
  misc_feature 1..19: note = RNA
  misc_feature 20..21: note = DNA
gctcaagtcacatttgatttt

SEQ ID NO: 1832 - DNA, 21 bp, synthetic construct
  source 1..21: mol_type = other DNA
  modified_base 1: mod_base = OTHER; note = adenosine-3'-phosphate
  modified_base 2: mod_base = OTHER; note = uridine-3'-phosphate
  modified_base 3: mod_base = OTHER; note = uridine-3'-phosphate
  modified_base 4: mod_base = OTHER; note = uridine-3'-phosphate
  modified_base 5: mod_base = OTHER; note = guanosine-3'-phosphate
  modified_base 6: mod_base = OTHER; note = adenosine-3'-phosphate
  modified_base 7: mod_base = OTHER; note = uridine-3'-phosphate
  modified_base 8: mod_base = OTHER; note = uridine-3'-phosphate
  modified_base 9: mod_base = OTHER; note = cytidine-3'-phosphate
  modified_base 10: mod_base = OTHER; note = uridine-3'-phosphate
  modified_base 11: mod_base = OTHER; note = guanosine-3'-phosphate
  modified_base 12: mod_base = OTHER; note = adenosine-3'-phosphate
  modified_base 13: mod_base = OTHER; note = adenosine-3'-phosphate
  modified_base 14: mod_base = OTHER; note = adenosine-3'-phosphate
  modified_base 15: mod_base = OTHER; note = cytidine-3'-phosphate
  modified_base 16: mod_base = OTHER; note = adenosine-3'-phosphate
  modified_base 17: mod_base = OTHER; note = guanosine-3'-phosphate
  modified_base 18: mod_base = OTHER; note = cytidine-3'-phosphate
  modified_base 19: mod_base = OTHER; note = adenosine-3'-phosphate
  misc_feature 1..19: note = RNA
  misc_feature 20..21: note = DNA
atttgattctgaaacagcatt

SEQ ID NO: 1833 - DNA, 21 bp, synthetic construct
  source 1..21: mol_type = other DNA
  modified_base 1: mod_base = OTHER; note = uridine-3'-phosphate
  modified_base 2: mod_base = OTHER; note = guanosine-3'-phosphate
  modified_base 3: mod_base = OTHER; note = adenosine-3'-phosphate
  modified_base 4: mod_base = OTHER; note = adenosine-3'-phosphate
  modified_base 5: mod_base = OTHER; note = adenosine-3'-phosphate
  modified_base 6: mod_base = OTHER; note = cytidine-3'-phosphate
  modified_base 7: mod_base = OTHER; note = adenosine-3'-phosphate
  modified_base 8: mod_base = OTHER; note = guanosine-3'-phosphate
  modified_base 9: mod_base = OTHER; note = cytidine-3'-phosphate
  modified_base 10: mod_base = OTHER; note = adenosine-3'-phosphate
  modified_base 11: mod_base = OTHER; note = guanosine-3'-phosphate
  modified_base 12: mod_base = OTHER; note = uridine-3'-phosphate
  modified_base 13: mod_base = OTHER; note = cytidine-3'-phosphate
  modified_base 14: mod_base = OTHER; note = adenosine-3'-phosphate
  modified_base 15: mod_base = OTHER; note = adenosine-3'-phosphate
  modified_base 16: mod_base = OTHER; note = adenosine-3'-phosphate
  modified_base 17: mod_base = OTHER; note = guanosine-3'-phosphate
  modified_base 18: mod_base = OTHER; note = adenosine-3'-phosphate
  modified_base 19: mod_base = OTHER; note = adenosine-3'-phosphate
  misc_feature 1..19: note = RNA
  misc_feature 20..21: note = DNA
tgaaacagcagtcaaagaatt

SEQ ID NO: 1834 - DNA, 21 bp, synthetic construct
  source 1..21: mol_type = other DNA
  modified_base 1: mod_base = OTHER; note = cytidine-3'-phosphate
  modified_base 2: mod_base = OTHER; note = adenosine-3'-phosphate
  modified_base 3: mod_base = OTHER; note = adenosine-3'-phosphate
  modified_base 4: mod_base = OTHER; note = adenosine-3'-phosphate
  modified_base 5: mod_base = OTHER; note = guanosine-3'-phosphate
  modified_base 6: mod_base = OTHER; note = adenosine-3'-phosphate
  modified_base 7: mod_base = OTHER; note = adenosine-3'-phosphate
  modified_base 8: mod_base = OTHER; note = cytidine-3'-phosphate
  modified_base 9: mod_base = OTHER; note = uridine-3'-phosphate
  modified_base 10: mod_base = OTHER; note = guanosine-3'-phosphate
  modified_base 11: mod_base = OTHER; note = uridine-3'-phosphate
  modified_base 12: mod_base = OTHER; note = cytidine-3'-phosphate
  modified_base 13: mod_base = OTHER; note = adenosine-3'-phosphate
  modified_base 14: mod_base = OTHER; note = uridine-3'-phosphate
  modified_base 15: mod_base = OTHER; note = adenosine-3'-phosphate
  modified_base 16: mod_base = OTHER; note = cytidine-3'-phosphate
  modified_base 17: mod_base = OTHER; note = uridine-3'-phosphate
  modified_base 18: mod_base = OTHER; note = adenosine-3'-phosphate
  modified_base 19: mod_base = OTHER; note = cytidine-3'-phosphate
  misc_feature 1..19: note = RNA
  misc_feature 20..21: note = DNA
caaagaactgtcatactactt

SEQ ID NO: 1835 - DNA, 21 bp, synthetic construct
  source 1..21: mol_type = other DNA
  modified_base 1: mod_base = OTHER; note = cytidine-3'-phosphate
  modified_base 2: mod_base = OTHER; note = adenosine-3'-phosphate
  modified_base 3: mod_base = OTHER; note = uridine-3'-phosphate
  modified_base 4: mod_base = OTHER; note = adenosine-3'-phosphate
  modified_base 5: mod_base = OTHER; note = cytidine-3'-phosphate
  modified_base 6: mod_base = OTHER; note = uridine-3'-phosphate
  modified_base 7: mod_base = OTHER; note = adenosine-3'-phosphate
  modified_base 8: mod_base = OTHER; note = cytidine-3'-phosphate
  modified_base 9: mod_base = OTHER; note = adenosine-3'-phosphate
  modified_base 10: mod_base = OTHER; note = guanosine-3'-phosphate
  modified_base 11: mod_base = OTHER; note = uridine-3'-phosphate
  modified_base 12: mod_base = OTHER; note = uridine-3'-phosphate
  modified_base 13: mod_base = OTHER; note = uridine-3'-phosphate
  modified_base 14: mod_base = OTHER; note = adenosine-3'-phosphate
  modified_base 15: mod_base = OTHER; note = guanosine-3'-phosphate
  modified_base 16: mod_base = OTHER; note = adenosine-3'-phosphate
  modified_base 17: mod_base = OTHER; note = adenosine-3'-phosphate
  modified_base 18: mod_base = OTHER; note = guanosine-3'-phosphate
  modified_base 19: mod_base = OTHER; note = adenosine-3'-phosphate
  misc_feature 1..19: note = RNA
  misc_feature 20..21: note = DNA
catactacagtttagaagatt

SEQ ID NO: 1836 - DNA, 21 bp, synthetic construct
  source 1..21: mol_type = other DNA
  modified_base 1: mod_base = OTHER; note = cytidine-3'-phosphate
  modified_base 2: mod_base = OTHER; note = adenosine-3'-phosphate
  modified_base 3: mod_base = OTHER; note = guanosine-3'-phosphate
  modified_base 4: mod_base = OTHER; note = uridine-3'-phosphate
  modified_base 5: mod_base = OTHER; note = uridine-3'-phosphate
  modified_base 6: mod_base = OTHER; note = uridine-3'-phosphate
  modified_base 7: mod_base = OTHER; note = adenosine-3'-phosphate
  modified_base 8: mod_base = OTHER; note = guanosine-3'-phosphate
  modified_base 9: mod_base = OTHER; note = adenosine-3'-phosphate
  modified_base 10: mod_base = OTHER; note = adenosine-3'-phosphate
  modified_base 11: mod_base = OTHER; note = guanosine-3'-phosphate
  modified_base 12: mod_base = OTHER; note = adenosine-3'-phosphate
  modified_base 13: mod_base = OTHER; note = uridine-3'-phosphate
  modified_base 14: mod_base = OTHER; note = uridine-3'-phosphate
  modified_base 15: mod_base = OTHER; note = uridine-3'-phosphate
  modified_base 16: mod_base = OTHER; note = adenosine-3'-phosphate
  modified_base 17: mod_base = OTHER; note = adenosine-3'-phosphate
  modified_base 18: mod_base = OTHER; note = adenosine-3'-phosphate
  modified_base 19: mod_base = OTHER; note = cytidine-3'-phosphate
  misc_feature 1..19: note = RNA
  misc_feature 20..21: note = DNA
cagtttagaagatttaaactt

SEQ ID NO: 1837 - DNA, 21 bp, synthetic construct
  source 1..21: mol_type = other DNA
  modified_base 1: mod_base = OTHER; note = uridine-3'-phosphate
  modified_base 2: mod_base = OTHER; note = adenosine-3'-phosphate
  modified_base 3: mod_base = OTHER; note = adenosine-3'-phosphate
  modified_base 4: mod_base = OTHER; note = adenosine-3'-phosphate
  modified_base 5: mod_base = OTHER; note = cytidine-3'-phosphate
  modified_base 6: mod_base = OTHER; note = adenosine-3'-phosphate
  modified_base 7: mod_base = OTHER; note = adenosine-3'-phosphate
  modified_base 8: mod_base = OTHER; note = cytidine-3'-phosphate
  modified_base 9: mod_base = OTHER; note = adenosine-3'-phosphate
  modified_base 10: mod_base = OTHER; note = adenosine-3'-phosphate
  modified_base 11: mod_base = OTHER; note = guanosine-3'-phosphate
  modified_base 12: mod_base = OTHER; note = uridine-3'-phosphate
  modified_base 13: mod_base = OTHER; note = adenosine-3'-phosphate
  modified_base 14: mod_base = OTHER; note = cytidine-3'-phosphate
  modified_base 15: mod_base = OTHER; note = cytidine-3'-phosphate
  modified_base 16: mod_base = OTHER; note = uridine-3'-phosphate
  modified_base 17: mod_base = OTHER; note = uridine-3'-phosphate
  modified_base 18: mod_base = OTHER; note = uridine-3'-phosphate
  modified_base 19: mod_base = OTHER; note = adenosine-3'-phosphate
  misc_feature 1..19: note = RNA
  misc_feature 20..21: note = DNA
taaacaacaagtacctttatt

SEQ ID NO: 1838 - DNA, 21 bp, synthetic construct
  source 1..21: mol_type = other DNA
  modified_base 1: mod_base = OTHER; note = cytidine-3'-phosphate
  modified_base 2: mod_base = OTHER; note = adenosine-3'-phosphate
  modified_base 3: mod_base = OTHER; note = adenosine-3'-phosphate
  modified_base 4: mod_base = OTHER; note = guanosine-3'-phosphate
  modified_base 5: mod_base = OTHER; note = uridine-3'-phosphate
  modified_base 6: mod_base = OTHER; note = adenosine-3'-phosphate
  modified_base 7: mod_base = OTHER; note = cytidine-3'-phosphate
  modified_base 8: mod_base = OTHER; note = cytidine-3'-phosphate
  modified_base 9: mod_base = OTHER; note = uridine-3'-phosphate
  modified_base 10: mod_base = OTHER; note = uridine-3'-phosphate
  modified_base 11: mod_base = OTHER; note = uridine-3'-phosphate
  modified_base 12: mod_base = OTHER; note = adenosine-3'-phosphate
  modified_base 13: mod_base = OTHER; note = uridine-3'-phosphate
  modified_base 14: mod_base = OTHER; note = adenosine-3'-phosphate
  modified_base 15: mod_base = OTHER; note = uridine-3'-phosphate
  modified_base 16: mod_base = OTHER; note = uridine-3'-phosphate
  modified_base 17: mod_base = OTHER; note = guanosine-3'-phosphate
  modified_base 18: mod_base = OTHER; note = cytidine-3'-phosphate
  modified_base 19: mod_base = OTHER; note = uridine-3'-phosphate
  misc_feature 1..19: note = RNA
  misc_feature 20..21: note = DNA
caagtacctttatattgcttt

SEQ ID NO: 1839 - DNA, 21 bp, synthetic construct
  source 1..21: mol_type = other DNA
  modified_base 1: mod_base = OTHER; note = uridine-3'-phosphate
  modified_base 2: mod_base = OTHER; note = adenosine-3'-phosphate
  modified_base 3: mod_base = OTHER; note = uridine-3'-phosphate
  modified_base 4: mod_base = OTHER; note = uridine-3'-phosphate
  modified_base 5: mod_base = OTHER; note = guanosine-3'-phosphate
  modified_base 6: mod_base = OTHER; note = cytidine-3'-phosphate
  modified_base 7: mod_base = OTHER; note = uridine-3'-phosphate
  modified_base 8: mod_base = OTHER; note = guanosine-3'-phosphate
  modified_base 9: mod_base = OTHER; note = uridine-3'-phosphate
  modified_base 10: mod_base = OTHER; note = adenosine-3'-phosphate
  modified_base 11: mod_base = OTHER; note = adenosine-3'-phosphate
  modified_base 12: mod_base = OTHER; note = cytidine-3'-phosphate
  modified_base 13: mod_base = OTHER; note = adenosine-3'-phosphate
  modified_base 14: mod_base = OTHER; note = guanosine-3'-phosphate
  modified_base 15: mod_base = OTHER; note = uridine-3'-phosphate
  modified_base 16: mod_base = OTHER; note = cytidine-3'-phosphate
  modified_base 17: mod_base = OTHER; note = adenosine-3'-phosphate
  modified_base 18: mod_base = OTHER; note = uridine-3'-phosphate
  modified_base 19: mod_base = OTHER; note = adenosine-3'-phosphate
  misc_feature 1..19: note = RNA
  misc_feature 20..21: note = DNA
tattgctgtaacagtcatatt

SEQ ID NO: 1840 - DNA, 21 bp, synthetic construct
  source 1..21: mol_type = other DNA
  modified_base 1: mod_base = OTHER; note = adenosine-3'-phosphate
  modified_base 2: mod_base = OTHER; note = adenosine-3'-phosphate
  modified_base 3: mod_base = OTHER; note = cytidine-3'-phosphate
  modified_base 4: mod_base = OTHER; note = adenosine-3'-phosphate
  modified_base 5: mod_base = OTHER; note = guanosine-3'-phosphate
  modified_base 6: mod_base = OTHER; note = uridine-3'-phosphate
  modified_base 7: mod_base = OTHER; note = cytidine-3'-phosphate
  modified_base 8: mod_base = OTHER; note = adenosine-3'-phosphate
  modified_base 9: mod_base = OTHER; note = uridine-3'-phosphate
  modified_base 10: mod_base = OTHER; note = adenosine-3'-phosphate
  modified_base 11: mod_base = OTHER; note = guanosine-3'-phosphate
  modified_base 12: mod_base = OTHER; note = adenosine-3'-phosphate
  modified_base 13: mod_base = OTHER; note = guanosine-3'-phosphate
  modified_base 14: mod_base = OTHER; note = uridine-3'-phosphate
  modified_base 15: mod_base = OTHER; note = cytidine-3'-phosphate
  modified_base 16: mod_base = OTHER; note = uridine-3'-phosphate
  modified_base 17: mod_base = OTHER; note = adenosine-3'-phosphate
  modified_base 18: mod_base = OTHER; note = cytidine-3'-phosphate
  modified_base 19: mod_base = OTHER; note = adenosine-3'-phosphate
  misc_feature 1..19: note = RNA
  misc_feature 20..21: note = DNA
aacagtcatagagtctacatt

SEQ ID NO: 1841 - DNA, 21 bp, synthetic construct
  source 1..21: mol_type = other DNA
  modified_base 1: mod_base = OTHER; note = adenosine-3'-phosphate
  modified_base 2: mod_base = OTHER; note = guanosine-3'-phosphate
  modified_base 3: mod_base = OTHER; note = adenosine-3'-phosphate
  modified_base 4: mod_base = OTHER; note = guanosine-3'-phosphate
  modified_base 5: mod_base = OTHER; note = uridine-3'-phosphate
  modified_base 6: mod_base = OTHER; note = cytidine-3'-phosphate
  modified_base 7: mod_base = OTHER; note = uridine-3'-phosphate
  modified_base 8: mod_base = OTHER; note = adenosine-3'-phosphate
  modified_base 9: mod_base = OTHER; note = cytidine-3'-phosphate
  modified_base 10: mod_base = OTHER; note = adenosine-3'-phosphate
  modified_base 11: mod_base = OTHER; note = guanosine-3'-phosphate
  modified_base 12: mod_base = OTHER; note = guanosine-3'-phosphate
  modified_base 13: mod_base = OTHER; note = uridine-3'-phosphate
  modified_base 14: mod_base = OTHER; note = guanosine-3'-phosphate
  modified_base 15: mod_base = OTHER; note = guanosine-3'-phosphate
  modified_base 16: mod_base = OTHER; note = adenosine-3'-phosphate
  modified_base 17: mod_base = OTHER; note = uridine-3'-phosphate
  modified_base 18: mod_base = OTHER; note = uridine-3'-phosphate
  modified_base 19: mod_base = OTHER; note = uridine-3'-phosphate
  misc_feature 1..19: note = RNA
  misc_feature 20..21: note = DNA
agagtctacaggtggattttt

SEQ ID NO: 1842 - DNA, 21 bp, synthetic construct
  source 1..21: mol_type = other DNA
  modified_base 1: mod_base = OTHER; note = guanosine-3'-phosphate
  modified_base 2: mod_base = OTHER; note = guanosine-3'-phosphate
  modified_base 3: mod_base = OTHER; note = adenosine-3'-phosphate
  modified_base 4: mod_base = OTHER; note = uridine-3'-phosphate
  modified_base 5: mod_base = OTHER; note = uridine-3'-phosphate
  modified_base 6: mod_base = OTHER; note = uridine-3'-phosphate
  modified_base 7: mod_base = OTHER; note = uridine-3'-phosphate
  modified_base 8: mod_base = OTHER; note = cytidine-3'-phosphate
  modified_base 9: mod_base = OTHER; note = uridine-3'-phosphate
  modified_base 10: mod_base = OTHER; note = guanosine-3'-phosphate
  modified_base 11: mod_base = OTHER; note = adenosine-3'-phosphate
  modified_base 12: mod_base = OTHER; note = adenosine-3'-phosphate
  modified_base 13: mod_base = OTHER; note = guanosine-3'-phosphate
  modified_base 14: mod_base = OTHER; note = adenosine-3'-phosphate
  modified_base 15: mod_base = OTHER; note = guanosine-3'-phosphate
  modified_base 16: mod_base = OTHER; note = guanosine-3'-phosphate
  modified_base 17: mod_base = OTHER; note = cytidine-3'-phosphate
  modified_base 18: mod_base = OTHER; note = adenosine-3'-phosphate
  modified_base 19: mod_base = OTHER; note = guanosine-3'-phosphate
  misc_feature 1..19: note = RNA
  misc_feature 20..21: note = DNA
ggattttctgaagaggcagtt

SEQ ID NO: 1843 - DNA, 21 bp, synthetic construct
  source 1..21: mol_type = other DNA
  modified_base 1: mod_base = OTHER; note = guanosine-3'-phosphate
  modified_base 2: mod_base = OTHER; note = adenosine-3'-phosphate
  modified_base 3: mod_base = OTHER; note = adenosine-3'-phosphate
  modified_base 4: mod_base = OTHER; note = guanosine-3'-phosphate
  modified_base 5: mod_base = OTHER; note = adenosine-3'-phosphate
  modified_base 6: mod_base = OTHER; note = guanosine-3'-phosphate
  modified_base 7: mod_base = OTHER; note = guanosine-3'-phosphate
  modified_base 8: mod_base = OTHER; note = cytidine-3'-phosphate
  modified_base 9: mod_base = OTHER; note = adenosine-3'-phosphate
  modified_base 10: mod_base = OTHER; note = guanosine-3'-phosphate
  modified_base 11: mod_base = OTHER; note = adenosine-3'-phosphate
  modified_base 12: mod_base = OTHER; note = adenosine-3'-phosphate
  modified_base 13: mod_base = OTHER; note = adenosine-3'-phosphate
  modified_base 14: mod_base = OTHER; note = uridine-3'-phosphate
  modified_base 15: mod_base = OTHER; note = adenosine-3'-phosphate
  modified_base 16: mod_base = OTHER; note = cytidine-3'-phosphate
  modified_base 17: mod_base = OTHER; note = cytidine-3'-phosphate
  modified_base 18: mod_base = OTHER; note = uridine-3'-phosphate
  modified_base 19: mod_base = OTHER; note = guanosine-3'-phosphate
  misc_feature 1..19: note = RNA
  misc_feature 20..21: note = DNA
gaagaggcagaaatacctgtt

SEQ ID NO: 1844 - DNA, 21 bp, synthetic construct
  source 1..21: mol_type = other DNA
  modified_base 1: mod_base = OTHER; note = adenosine-3'-phosphate
  modified_base 2: mod_base = OTHER; note = guanosine-3'-phosphate
  modified_base 3: mod_base = OTHER; note = adenosine-3'-phosphate
  modified_base 4: mod_base = OTHER; note = adenosine-3'-phosphate
  modified_base 5: mod_base = OTHER; note = adenosine-3'-phosphate
  modified_base 6: mod_base = OTHER; note = uridine-3'-phosphate
  modified_base 7: mod_base = OTHER; note = adenosine-3'-phosphate
  modified_base 8: mod_base = OTHER; note = cytidine-3'-phosphate
  modified_base 9: mod_base = OTHER; note = cytidine-3'-phosphate
  modified_base 10: mod_base = OTHER; note = uridine-3'-phosphate
  modified_base 11: mod_base = OTHER; note = guanosine-3'-phosphate
  modified_base 12: mod_base = OTHER; note = guanosine-3'-phosphate
  modified_base 13: mod_base = OTHER; note = cytidine-3'-phosphate
  modified_base 14: mod_base = OTHER; note = adenosine-3'-phosphate
  modified_base 15: mod_base = OTHER; note = uridine-3'-phosphate
  modified_base 16: mod_base = OTHER; note = cytidine-3'-phosphate
  modified_base 17: mod_base = OTHER; note = adenosine-3'-phosphate
  modified_base 18: mod_base = OTHER; note = adenosine-3'-phosphate
  modified_base 19: mod_base = OTHER; note = adenosine-3'-phosphate
  misc_feature 1..19: note = RNA
  misc_feature 20..21: note = DNA
agaaatacctggcatcaaatt

SEQ ID NO: 1845 - DNA, 21 bp, synthetic construct
  source 1..21: mol_type = other DNA
  modified_base 1: mod_base = OTHER; note = guanosine-3'-phosphate
  modified_base 2: mod_base = OTHER; note = cytidine-3'-phosphate
  modified_base 3: mod_base = OTHER; note = adenosine-3'-phosphate
  modified_base 4: mod_base = OTHER; note = uridine-3'-phosphate
  modified_base 5: mod_base = OTHER; note = cytidine-3'-phosphate
  modified_base 6: mod_base = OTHER; note = adenosine-3'-phosphate
  modified_base 7: mod_base = OTHER; note = adenosine-3'-phosphate
  modified_base 8: mod_base = OTHER; note = adenosine-3'-phosphate
  modified_base 9: mod_base = OTHER; note = uridine-3'-phosphate
  modified_base 10: mod_base = OTHER; note = adenosine-3'-phosphate
  modified_base 11: mod_base = OTHER; note = uridine-3'-phosphate
  modified_base 12: mod_base = OTHER; note = guanosine-3'-phosphate
  modified_base 13: mod_base = OTHER; note = uridine-3'-phosphate
  modified_base 14: mod_base = OTHER; note = cytidine-3'-phosphate
  modified_base 15: mod_base = OTHER; note = cytidine-3'-phosphate
  modified_base 16: mod_base = OTHER; note = uridine-3'-phosphate
  modified_base 17: mod_base = OTHER; note = cytidine-3'-phosphate
  modified_base 18: mod_base = OTHER; note = uridine-3'-phosphate
  modified_base 19: mod_base = OTHER; note = cytidine-3'-phosphate
  misc_feature 1..19: note = RNA
  misc_feature 20..21: note = DNA
gcatcaaatatgtcctctctt

SEQ ID NO: 1846 - DNA, 21 bp, synthetic construct
  source 1..21: mol_type = other DNA
  modified_base 1: mod_base = OTHER; note = uridine-3'-phosphate
  modified_base 2: mod_base = OTHER; note = guanosine-3'-phosphate
  modified_base 3: mod_base = OTHER; note = uridine-3'-phosphate
  modified_base 4: mod_base = OTHER; note = cytidine-3'-phosphate
  modified_base 5: mod_base = OTHER; note = cytidine-3'-phosphate
  modified_base 6: mod_base = OTHER; note = uridine-3'-phosphate
  modified_base 7: mod_base = OTHER; note = cytidine-3'-phosphate
  modified_base 8: mod_base = OTHER; note = uridine-3'-phosphate
  modified_base 9: mod_base = OTHER; note = cytidine-3'-phosphate
  modified_base 10: mod_base = OTHER; note = uridine-3'-phosphate
  modified_base 11: mod_base = OTHER; note = cytidine-3'-phosphate
  modified_base 12: mod_base = OTHER; note = cytidine-3'-phosphate
  modified_base 13: mod_base = OTHER; note = cytidine-3'-phosphate
  modified_base 14: mod_base = OTHER; note = uridine-3'-phosphate
  modified_base 15: mod_base = OTHER; note = adenosine-3'-phosphate
  modified_base 16: mod_base = OTHER; note = cytidine-3'-phosphate
  modified_base 17: mod_base = OTHER; note = adenosine-3'-phosphate
  modified_base 18: mod_base = OTHER; note = adenosine-3'-phosphate
  modified_base 19: mod_base = OTHER; note = adenosine-3'-phosphate
  misc_feature 1..19: note = RNA
  misc_feature 20..21: note = DNA
tgtcctctctccctacaaatt

SEQ ID NO: 1847 - DNA, 21 bp, synthetic construct
  source 1..21: mol_type = other DNA
  modified_base 1: mod_base = OTHER; note = guanosine-3'-phosphate
  modified_base 2: mod_base = OTHER; note = adenosine-3'-phosphate
  modified_base 3: mod_base = OTHER; note = adenosine-3'-phosphate
  modified_base 4: mod_base = OTHER; note = uridine-3'-phosphate
  modified_base 5: mod_base = OTHER; note = uridine-3'-phosphate
  modified_base 6: mod_base = OTHER; note = uridine-3'-phosphate
  modified_base 7: mod_base = OTHER; note = guanosine-3'-phosphate
  modified_base 8: mod_base = OTHER; note = guanosine-3'-phosphate
  modified_base 9: mod_base = OTHER; note = uridine-3'-phosphate
  modified_base 10: mod_base = OTHER; note = uridine-3'-phosphate
  modified_base 11: mod_base = OTHER; note = guanosine-3'-phosphate
  modified_base 12: mod_base = OTHER; note = cytidine-3'-phosphate
  modified_base 13: mod_base = OTHER; note = uridine-3'-phosphate
  modified_base 14: mod_base = OTHER; note = adenosine-3'-phosphate
  modified_base 15: mod_base = OTHER; note = cytidine-3'-phosphate
  modified_base 16: mod_base = OTHER; note = uridine-3'-phosphate
  modified_base 17: mod_base = OTHER; note = cytidine-3'-phosphate
  modified_base 18: mod_base = OTHER; note = cytidine-3'-phosphate
  modified_base 19: mod_base = OTHER; note = uridine-3'-phosphate
  misc_feature 1..19: note = RNA
  misc_feature 20..21: note = DNA
gaatttggttgctactccttt

SEQ ID NO: 1848 - DNA, 21 bp, synthetic construct
  source 1..21: mol_type = other DNA
  modified_base 1: mod_base = OTHER; note = guanosine-3'-phosphate
  modified_base 2: mod_base = OTHER; note = cytidine-3'-phosphate
  modified_base 3: mod_base = OTHER; note = uridine-3'-phosphate
  modified_base 4: mod_base = OTHER; note = adenosine-3'-phosphate
  modified_base 5: mod_base = OTHER; note = cytidine-3'-phosphate
  modified_base 6: mod_base = OTHER; note = uridine-3'-phosphate
  modified_base 7: mod_base = OTHER; note = cytidine-3'-phosphate
  modified_base 8: mod_base = OTHER; note = cytidine-3'-phosphate
  modified_base 9: mod_base = OTHER; note = uridine-3'-phosphate
  modified_base 10: mod_base = OTHER; note = cytidine-3'-phosphate
  modified_base 11: mod_base = OTHER; note = uridine-3'-phosphate
  modified_base 12: mod_base = OTHER; note = uridine-3'-phosphate
  modified_base 13: mod_base = OTHER; note = uridine-3'-phosphate
  modified_base 14: mod_base = OTHER; note = uridine-3'-phosphate
  modified_base 15: mod_base = OTHER; note = cytidine-3'-phosphate
  modified_base 16: mod_base = OTHER; note = cytidine-3'-phosphate
  modified_base 17: mod_base = OTHER; note = uridine-3'-phosphate
  modified_base 18: mod_base = OTHER; note = guanosine-3'-phosphate
  modified_base 19: mod_base = OTHER; note = adenosine-3'-phosphate
  misc_feature 1..19: note = RNA
  misc_feature 20..21: note = DNA
gctactcctcttttcctgatt

SEQ ID NO: 1849 - DNA, 21 bp, synthetic construct
  source 1..21: mol_type = other DNA
  modified_base 1: mod_base = OTHER; note = cytidine-3'-phosphate
  modified_base 2: mod_base = OTHER; note = uridine-3'-phosphate
  modified_base 3: mod_base = OTHER; note = cytidine-3'-phosphate
  modified_base 4: mod_base = OTHER; note = uridine-3'-phosphate
  modified_base 5: mod_base = OTHER; note = uridine-3'-phosphate
  modified_base 6: mod_base = OTHER; note = uridine-3'-phosphate
  modified_base 7: mod_base = OTHER; note = uridine-3'-phosphate
  modified_base 8: mod_base = OTHER; note = cytidine-3'-phosphate
  modified_base 9: mod_base = OTHER; note = cytidine-3'-phosphate
  modified_base 10: mod_base = OTHER; note = uridine-3'-phosphate
  modified_base 11: mod_base = OTHER; note = guanosine-3'-phosphate
  modified_base 12: mod_base = OTHER; note = adenosine-3'-phosphate
  modified_base 13: mod_base = OTHER; note = adenosine-3'-phosphate
  modified_base 14: mod_base = OTHER; note = guanosine-3'-phosphate
  modified_base 15: mod_base = OTHER; note = cytidine-3'-phosphate
  modified_base 16: mod_base = OTHER; note = cytidine-3'-phosphate
  modified_base 17: mod_base = OTHER; note = uridine-3'-phosphate
  modified_base 18: mod_base = OTHER; note = guanosine-3'-phosphate
  modified_base 19: mod_base = OTHER; note = guanosine-3'-phosphate
  misc_feature 1..19: note = RNA
  misc_feature 20..21: note = DNA
ctcttttcctgaagcctggtt

SEQ ID NO: 1850 - DNA, 21 bp, synthetic construct
  source 1..21: mol_type = other DNA
  modified_base 1: mod_base = OTHER; note = cytidine-3'-phosphate
  modified_base 2: mod_base = OTHER; note = cytidine-3'-phosphate
  modified_base 3: mod_base = OTHER; note = uridine-3'-phosphate
  modified_base 4: mod_base = OTHER; note = guanosine-3'-phosphate
  modified_base 5: mod_base = OTHER; note = guanosine-3'-phosphate
  modified_base 6: mod_base = OTHER; note = guanosine-3'-phosphate
  modified_base 7: mod_base = OTHER; note = adenosine-3'-phosphate
  modified_base 8: mod_base = OTHER; note = uridine-3'-phosphate
  modified_base 9: mod_base = OTHER; note = uridine-3'-phosphate
  modified_base 10: mod_base = OTHER; note = cytidine-3'-phosphate
  modified_base 11: mod_base = OTHER; note = cytidine-3'-phosphate
  modified_base 12: mod_base = OTHER; note = adenosine-3'-phosphate
  modified_base 13: mod_base = OTHER; note = uridine-3'-phosphate
  modified_base 14: mod_base = OTHER; note = adenosine-3'-phosphate
  modified_base 15: mod_base = OTHER; note = uridine-3'-phosphate
  modified_base 16: mod_base = OTHER; note = cytidine-3'-phosphate
  modified_base 17: mod_base = OTHER; note = cytidine-3'-phosphate
  modified_base 18: mod_base = OTHER; note = cytidine-3'-phosphate
  modified_base 19: mod_base = OTHER; note = adenosine-3'-phosphate
  misc_feature 1..19: note = RNA
  misc_feature 20..21: note = DNA
cctgggattccatatcccatt

SEQ ID NO: 1851 - DNA, 21 bp, synthetic construct
  source 1..21: mol_type = other DNA
  modified_base 1: mod_base = OTHER; note = cytidine-3'-phosphate
  modified_base 2: mod_base = OTHER; note = adenosine-3'-phosphate
  modified_base 3: mod_base = OTHER; note = uridine-3'-phosphate
  modified_base 4: mod_base = OTHER; note = adenosine-3'-phosphate
  modified_base 5: mod_base = OTHER; note = uridine-3'-phosphate
  modified_base 6: mod_base = OTHER; note = cytidine-3'-phosphate
  modified_base 7: mod_base = OTHER; note = cytidine-3'-phosphate
  modified_base 8: mod_base = OTHER; note = cytidine-3'-phosphate
  modified_base 9: mod_base = OTHER; note = adenosine-3'-phosphate
  modified_base 10: mod_base = OTHER; note = uridine-3'-phosphate
  modified_base 11: mod_base = OTHER; note = cytidine-3'-phosphate
  modified_base 12: mod_base = OTHER; note = adenosine-3'-phosphate
  modified_base 13: mod_base = OTHER; note = adenosine-3'-phosphate
  modified_base 14: mod_base = OTHER; note = guanosine-3'-phosphate
  modified_base 15: mod_base = OTHER; note = guanosine-3'-phosphate
  modified_base 16: mod_base = OTHER; note = uridine-3'-phosphate
  modified_base 17: mod_base = OTHER; note = guanosine-3'-phosphate
  modified_base 18: mod_base = OTHER; note = cytidine-3'-phosphate
  modified_base 19: mod_base = OTHER; note = adenosine-3'-phosphate
  misc_feature 1..19: note = RNA
  misc_feature 20..21: note = DNA
catatcccatcaaggtgcatt

SEQ ID NO: 1852 - DNA, 21 bp, synthetic construct
  source 1..21: mol_type = other DNA
  modified_base 1: mod_base = OTHER; note = cytidine-3'-phosphate
  modified_base 2: mod_base = OTHER; note = cytidine-3'-phosphate
  modified_base 3: mod_base = OTHER; note = adenosine-3'-phosphate
  modified_base 4: mod_base = OTHER; note = uridine-3'-phosphate
  modified_base 5: mod_base = OTHER; note = cytidine-3'-phosphate
  modified_base 6: mod_base = OTHER; note = adenosine-3'-phosphate
  modified_base 7: mod_base = OTHER; note = adenosine-3'-phosphate
  modified_base 8: mod_base = OTHER; note = guanosine-3'-phosphate
  modified_base 9: mod_base = OTHER; note = guanosine-3'-phosphate
  modified_base 10: mod_base = OTHER; note = uridine-3'-phosphate
  modified_base 11: mod_base = OTHER; note = guanosine-3'-phosphate
  modified_base 12: mod_base = OTHER; note = cytidine-3'-phosphate
  modified_base 13: mod_base = OTHER; note = adenosine-3'-phosphate
  modified_base 14: mod_base = OTHER; note = guanosine-3'-phosphate
  modified_base 15: mod_base = OTHER; note = guanosine-3'-phosphate
  modified_base 16: mod_base = OTHER; note = uridine-3'-phosphate
  modified_base 17: mod_base = OTHER; note = uridine-3'-phosphate
  modified_base 18: mod_base = OTHER; note = adenosine-3'-phosphate
  modified_base 19: mod_base = OTHER; note = adenosine-3'-phosphate
  misc_feature 1..19: note = RNA
  misc_feature 20..21: note = DNA
ccatcaaggtgcaggttaatt

SEQ ID NO: 1853 - DNA, 21 bp, synthetic construct
  source 1..21: mol_type = other DNA
  modified_base 1: mod_base = OTHER; note = cytidine-3'-phosphate
  modified_base 2: mod_base = OTHER; note = adenosine-3'-phosphate
  modified_base 3: mod_base = OTHER; note = guanosine-3'-phosphate
  modified_base 4: mod_base = OTHER; note = guanosine-3'-phosphate
  modified_base 5: mod_base = OTHER; note = uridine-3'-phosphate
  modified_base 6: mod_base = OTHER; note = uridine-3'-phosphate
  modified_base 7: mod_base = OTHER; note = adenosine-3'-phosphate
  modified_base 8: mod_base = OTHER; note = adenosine-3'-phosphate
  modified_base 9: mod_base = OTHER; note = adenosine-3'-phosphate
  modified_base 10: mod_base = OTHER; note = guanosine-3'-phosphate
  modified_base 11: mod_base = OTHER; note = adenosine-3'-phosphate
  modified_base 12: mod_base = OTHER; note = uridine-3'-phosphate
  modified_base 13: mod_base = OTHER; note = uridine-3'-phosphate
  modified_base 14: mod_base = OTHER; note = cytidine-3'-phosphate
  modified_base 15: mod_base = OTHER; note = guanosine-3'-phosphate
  modified_base 16: mod_base = OTHER; note = cytidine-3'-phosphate
  modified_base 17: mod_base = OTHER; note = uridine-3'-phosphate
  modified_base 18: mod_base = OTHER; note = uridine-3'-phosphate
  modified_base 19: mod_base = OTHER; note = guanosine-3'-phosphate
  misc_feature 1..19: note = RNA
  misc_feature 20..21: note = DNA
caggttaaagattcgcttgtt

SEQ ID NO: 1854 - DNA, 21 bp, synthetic construct
  source 1..21: mol_type = other DNA
  modified_base 1: mod_base = OTHER; note = uridine-3'-phosphate
  modified_base 2: mod_base = OTHER; note = uridine-3'-phosphate
  modified_base 3: mod_base = OTHER; note = cytidine-3'-phosphate
  modified_base 4: mod_base = OTHER; note = guanosine-3'-phosphate
  modified_base 5: mod_base = OTHER; note = cytidine-3'-phosphate
  modified_base 6: mod_base = OTHER; note = uridine-3'-phosphate
  modified_base 7: mod_base = OTHER; note = uridine-3'-phosphate
  modified_base 8: mod_base = OTHER; note = guanosine-3'-phosphate
  modified_base 9: mod_base = OTHER; note = adenosine-3'-phosphate
  modified_base 10: mod_base = OTHER; note = cytidine-3'-phosphate
  modified_base 11: mod_base = OTHER; note = cytidine-3'-phosphate
  modified_base 12: mod_base = OTHER; note = adenosine-3'-phosphate
  modified_base 13: mod_base = OTHER; note = guanosine-3'-phosphate
  modified_base 14: mod_base = OTHER; note = uridine-3'-phosphate
  modified_base 15: mod_base = OTHER; note = uridine-3'-phosphate
  modified_base 16: mod_base = OTHER; note = guanosine-3'-phosphate
  modified_base 17: mod_base = OTHER; note = guanosine-3'-phosphate
  modified_base 18: mod_base = OTHER; note = uridine-3'-phosphate
  modified_base 19: mod_base = OTHER; note = adenosine-3'-phosphate
  misc_feature 1..19: note = RNA
  misc_feature 20..21: note = DNA
ttcgcttgaccagttggtatt

SEQ ID NO: 1855 - DNA, 21 bp, synthetic construct
  source 1..21: mol_type = other DNA
  modified_base 1: mod_base = OTHER; note = cytidine-3'-phosphate
  modified_base 2: mod_base = OTHER; note = cytidine-3'-phosphate
  modified_base 3: mod_base = OTHER; note = adenosine-3'-phosphate
  modified_base 4: mod_base = OTHER; note = guanosine-3'-phosphate
  modified_base 5: mod_base = OTHER; note = uridine-3'-phosphate
  modified_base 6: mod_base = OTHER; note = uridine-3'-phosphate
  modified_base 7: mod_base = OTHER; note = guanosine-3'-phosphate
  modified_base 8: mod_base = OTHER; note = guanosine-3'-phosphate
  modified_base 9: mod_base = OTHER; note = uridine-3'-phosphate
  modified_base 10: mod_base = OTHER; note = adenosine-3'-phosphate
  modified_base 11: mod_base = OTHER; note = guanosine-3'-phosphate
  modified_base 12: mod_base = OTHER; note = guanosine-3'-phosphate
  modified_base 13: mod_base = OTHER; note = adenosine-3'-phosphate
  modified_base 14: mod_base = OTHER; note = guanosine-3'-phosphate
  modified_base 15: mod_base = OTHER; note = guanosine-3'-phosphate
  modified_base 16: mod_base = OTHER; note = adenosine-3'-phosphate
  modified_base 17: mod_base = OTHER; note = guanosine-3'-phosphate
  modified_base 18: mod_base = OTHER; note = uridine-3'-phosphate
  modified_base 19: mod_base = OTHER; note = cytidine-3'-phosphate
  misc_feature 1..19: note = RNA
  misc_feature 20..21: note = DNA
ccagttggtaggaggagtctt

SEQ ID NO: 1856 - DNA, 21 bp, synthetic construct
  source 1..21: mol_type = other DNA
  modified_base 1: mod_base = OTHER; note = guanosine-3'-phosphate
  modified_base 2: mod_base = OTHER; note = guanosine-3'-phosphate
  modified_base 3: mod_base = OTHER; note = adenosine-3'-phosphate
  modified_base 4: mod_base = OTHER; note = guanosine-3'-phosphate
  modified_base 5: mod_base = OTHER; note = guanosine-3'-phosphate
  modified_base 6: mod_base = OTHER; note = adenosine-3'-phosphate
  modified_base 7: mod_base = OTHER; note = guanosine-3'-phosphate
  modified_base 8: mod_base = OTHER; note = uridine-3'-phosphate
  modified_base 9: mod_base = OTHER; note = cytidine-3'-phosphate
  modified_base 10: mod_base = OTHER; note = cytidine-3'-phosphate
  modified_base 11: mod_base = OTHER; note = cytidine-3'-phosphate
  modified_base 12: mod_base = OTHER; note = adenosine-3'-phosphate
  modified_base 13: mod_base = OTHER; note = guanosine-3'-phosphate
  modified_base 14: mod_base = OTHER; note = uridine-3'-phosphate
  modified_base 15: mod_base = OTHER; note = adenosine-3'-phosphate
  modified_base 16: mod_base = OTHER; note = adenosine-3'-phosphate
  modified_base 17: mod_base = OTHER; note = cytidine-3'-phosphate
  modified_base 18: mod_base = OTHER; note = adenosine-3'-phosphate
  modified_base 19: mod_base = OTHER; note = cytidine-3'-phosphate
  misc_feature 1..19: note = RNA
  misc_feature 20..21: note = DNA
ggaggagtcccagtaacactt

SEQ ID NO: 1857 - DNA, 21 bp, synthetic construct
  source 1..21: mol_type = other DNA
  modified_base 1: mod_base = OTHER; note = cytidine-3'-phosphate
  modified_base 2: mod_base = OTHER; note = adenosine-3'-phosphate
  modified_base 3: mod_base = OTHER; note = guanosine-3'-phosphate
  modified_base 4: mod_base = OTHER; note = uridine-3'-phosphate
  modified_base 5: mod_base = OTHER; note = adenosine-3'-phosphate
  modified_base 6: mod_base = OTHER; note = adenosine-3'-phosphate
  modified_base 7: mod_base = OTHER; note = cytidine-3'-phosphate
  modified_base 8: mod_base = OTHER; note = adenosine-3'-phosphate
  modified_base 9: mod_base = OTHER; note = cytidine-3'-phosphate
  modified_base 10: mod_base = OTHER; note = uridine-3'-phosphate
  modified_base 11: mod_base = OTHER; note = guanosine-3'-phosphate
  modified_base 12: mod_base = OTHER; note = adenosine-3'-phosphate
  modified_base 13: mod_base = OTHER; note = adenosine-3'-phosphate
  modified_base 14: mod_base = OTHER; note = uridine-3'-phosphate
  modified_base 15: mod_base = OTHER; note = guanosine-3'-phosphate
  modified_base 16: mod_base = OTHER; note = cytidine-3'-phosphate
  modified_base 17: mod_base = OTHER; note = adenosine-3'-phosphate
  modified_base 18: mod_base = OTHER; note = cytidine-3'-phosphate
  modified_base 19: mod_base = OTHER; note = adenosine-3'-phosphate
  misc_feature 1..19: note = RNA
  misc_feature 20..21: note = DNA
cagtaacactgaatgcacatt

SEQ ID NO: 1858 - DNA, 21 bp, synthetic construct
  source 1..21: mol_type = other DNA
  modified_base 1: mod_base = OTHER; note = guanosine-3'-phosphate
  modified_base 2: mod_base = OTHER; note = adenosine-3'-phosphate
  modified_base 3: mod_base = OTHER; note = adenosine-3'-phosphate
  modified_base 4: mod_base = OTHER; note = uridine-3'-phosphate
  modified_base 5: mod_base = OTHER; note = guanosine-3'-phosphate
  modified_base 6: mod_base = OTHER; note = cytidine-3'-phosphate
  modified_base 7: mod_base = OTHER; note = adenosine-3'-phosphate
  modified_base 8: mod_base = OTHER; note = cytidine-3'-phosphate
  modified_base 9: mod_base = OTHER; note = adenosine-3'-phosphate
  modified_base 10: mod_base = OTHER; note = adenosine-3'-phosphate
  modified_base 11: mod_base = OTHER; note = adenosine-3'-phosphate
  modified_base 12: mod_base = OTHER; note = cytidine-3'-phosphate
  modified_base 13: mod_base = OTHER; note = adenosine-3'-phosphate
  modified_base 14: mod_base = OTHER; note = adenosine-3'-phosphate
  modified_base 15: mod_base = OTHER; note = uridine-3'-phosphate
  modified_base 16: mod_base = OTHER; note = uridine-3'-phosphate
  modified_base 17: mod_base = OTHER; note = guanosine-3'-phosphate
  modified_base 18: mod_base = OTHER; note = adenosine-3'-phosphate
  modified_base 19: mod_base = OTHER; note = uridine-3'-phosphate
  misc_feature 1..19: note = RNA
  misc_feature 20..21: note = DNA
gaatgcacaaacaattgattt

SEQ ID NO: 1859 - DNA, 21 bp, synthetic construct
  source 1..21: mol_type = other DNA
  modified_base 1: mod_base = OTHER; note = adenosine-3'-phosphate
  modified_base 2: mod_base = OTHER; note = adenosine-3'-phosphate
  modified_base 3: mod_base = OTHER; note = cytidine-3'-phosphate
  modified_base 4: mod_base = OTHER; note = adenosine-3'-phosphate
  modified_base 5: mod_base = OTHER; note = adenosine-3'-phosphate
  modified_base 6: mod_base = OTHER; note = uridine-3'-phosphate
  modified_base 7: mod_base = OTHER; note = uridine-3'-phosphate
  modified_base 8: mod_base = OTHER; note = guanosine-3'-phosphate
  modified_base 9: mod_base = OTHER; note = adenosine-3'-phosphate
  modified_base 10: mod_base = OTHER; note = uridine-3'-phosphate
  modified_base 11: mod_base = OTHER; note = guanosine-3'-phosphate
  modified_base 12: mod_base = OTHER; note = uridine-3'-phosphate
  modified_base 13: mod_base = OTHER; note = adenosine-3'-phosphate
  modified_base 14: mod_base = OTHER; note = adenosine-3'-phosphate
  modified_base 15: mod_base = OTHER; note = adenosine-3'-phosphate
  modified_base 16: mod_base = OTHER; note = cytidine-3'-phosphate
  modified_base 17: mod_base = OTHER; note = cytidine-3'-phosphate
  modified_base 18: mod_base = OTHER; note = adenosine-3'-phosphate
  modified_base 19: mod_base = OTHER; note = adenosine-3'-phosphate
  misc_feature 1..19: note = RNA
  misc_feature 20..21: note = DNA
aacaattgatgtaaaccaatt

SEQ ID NO: 1860 - DNA, 21 bp, synthetic construct
  source 1..21: mol_type = other DNA
  modified_base 1: mod_base = OTHER; note = uridine-3'-phosphate
  modified_base 2: mod_base = OTHER; note = adenosine-3'-phosphate
  modified_base 3: mod_base = OTHER; note = adenosine-3'-phosphate
  modified_base 4: mod_base = OTHER; note = adenosine-3'-phosphate
  modified_base 5: mod_base = OTHER; note = cytidine-3'-phosphate
  modified_base 6: mod_base = OTHER; note = cytidine-3'-phosphate
  modified_base 7: mod_base = OTHER; note = adenosine-3'-phosphate
  modified_base 8: mod_base = OTHER; note = adenosine-3'-phosphate
  modified_base 9: mod_base = OTHER; note = guanosine-3'-phosphate
  modified_base 10: mod_base = OTHER; note = adenosine-3'-phosphate
  modified_base 11: mod_base = OTHER; note = guanosine-3'-phosphate
  modified_base 12: mod_base = OTHER; note = adenosine-3'-phosphate
  modified_base 13: mod_base = OTHER; note = cytidine-3'-phosphate
  modified_base 14: mod_base = OTHER; note = adenosine-3'-phosphate
  modified_base 15: mod_base = OTHER; note = uridine-3'-phosphate
  modified_base 16: mod_base = OTHER; note = cytidine-3'-phosphate
  modified_base 17: mod_base = OTHER; note = uridine-3'-phosphate
  modified_base 18: mod_base = OTHER; note = guanosine-3'-phosphate
  modified_base 19: mod_base = OTHER; note = adenosine-3'-phosphate
  misc_feature 1..19: note = RNA
  misc_feature 20..21: note = DNA
taaaccaagagacatctgatt

SEQ ID NO: 1861 - DNA, 21 bp, synthetic construct
  source 1..21: mol_type = other DNA
  modified_base 1: mod_base = OTHER; note = cytidine-3'-phosphate
  modified_base 2: mod_base = OTHER; note = adenosine-3'-phosphate
  modified_base 3: mod_base = OTHER; note = uridine-3'-phosphate
  modified_base 4: mod_base = OTHER; note = cytidine-3'-phosphate
  modified_base 5: mod_base = OTHER; note = uridine-3'-phosphate
  modified_base 6: mod_base = OTHER; note = guanosine-3'-phosphate
  modified_base 7: mod_base = OTHER; note = adenosine-3'-phosphate
  modified_base 8: mod_base = OTHER; note = cytidine-3'-phosphate
  modified_base 9: mod_base = OTHER; note = uridine-3'-phosphate
  modified_base 10: mod_base = OTHER; note = uridine-3'-phosphate
  modified_base 11: mod_base = OTHER; note = guanosine-3'-phosphate
  modified_base 12: mod_base = OTHER; note = guanosine-3'-phosphate
  modified_base 13: mod_base = OTHER; note = adenosine-3'-phosphate
  modified_base 14: mod_base = OTHER; note = uridine-3'-phosphate
  modified_base 15: mod_base = OTHER; note = cytidine-3'-phosphate
  modified_base 16: mod_base = OTHER; note = cytidine-3'-phosphate
  modified_base 17: mod_base = OTHER; note = adenosine-3'-phosphate
  modified_base 18: mod_base = OTHER; note = adenosine-3'-phosphate
  modified_base 19: mod_base = OTHER; note = guanosine-3'-phosphate
  misc_feature 1..19: note = RNA
  misc_feature 20..21: note = DNA
catctgacttggatccaagtt

SEQ ID NO: 1862 - DNA, 21 bp, synthetic construct
  source 1..21: mol_type = other DNA
  modified_base 1: mod_base = OTHER; note = guanosine-3'-phosphate
  modified_base 2: mod_base = OTHER; note = adenosine-3'-phosphate
  modified_base 3: mod_base = OTHER; note = uridine-3'-phosphate
  modified_base 4: mod_base = OTHER; note = cytidine-3'-phosphate
  modified_base 5: mod_base = OTHER; note = cytidine-3'-phosphate
  modified_base 6: mod_base = OTHER; note = adenosine-3'-phosphate
  modified_base 7: mod_base = OTHER; note = adenosine-3'-phosphate
  modified_base 8: mod_base = OTHER; note = guanosine-3'-phosphate
  modified_base 9: mod_base = OTHER; note = cytidine-3'-phosphate
  modified_base 10: mod_base = OTHER; note = adenosine-3'-phosphate
  modified_base 11: mod_base = OTHER; note = adenosine-3'-phosphate
  modified_base 12: mod_base = OTHER; note = adenosine-3'-phosphate
  modified_base 13: mod_base = OTHER; note = adenosine-3'-phosphate
  modified_base 14: mod_base = OTHER; note = guanosine-3'-phosphate
  modified_base 15: mod_base = OTHER; note = uridine-3'-phosphate
  modified_base 16: mod_base = OTHER; note = guanosine-3'-phosphate
  modified_base 17: mod_base = OTHER; note = uridine-3'-phosphate
  modified_base 18: mod_base = OTHER; note = adenosine-3'-phosphate
  modified_base 19: mod_base = OTHER; note = adenosine-3'-phosphate
  misc_feature 1..19: note = RNA
  misc_feature 20..21: note = DNA
gatccaagcaaaagtgtaatt

SEQ ID NO: 1863 - DNA, 21 bp, synthetic construct
  source 1..21: mol_type = other DNA
  modified_base 1: mod_base = OTHER; note = cytidine-3'-phosphate
  modified_base 2: mod_base = OTHER; note = adenosine-3'-phosphate
  modified_base 3: mod_base = OTHER; note = adenosine-3'-phosphate
  modified_base 4: mod_base = OTHER; note = adenosine-3'-phosphate
  modified_base 5: mod_base = OTHER; note = adenosine-3'-phosphate
  modified_base 6: mod_base = OTHER; note = guanosine-3'-phosphate
  modified_base 7: mod_base = OTHER; note = uridine-3'-phosphate
  modified_base 8: mod_base = OTHER; note = guanosine-3'-phosphate
  modified_base 9: mod_base = OTHER; note = uridine-3'-phosphate
  modified_base 10: mod_base = OTHER; note = adenosine-3'-phosphate
  modified_base 11: mod_base = OTHER; note = adenosine-3'-phosphate
  modified_base 12: mod_base = OTHER; note = cytidine-3'-phosphate
  modified_base 13: mod_base = OTHER; note = adenosine-3'-phosphate
  modified_base 14: mod_base = OTHER; note = cytidine-3'-phosphate
  modified_base 15: mod_base = OTHER; note = guanosine-3'-phosphate
  modified_base 16: mod_base = OTHER; note = uridine-3'-phosphate
  modified_base 17: mod_base = OTHER; note = guanosine-3'-phosphate
  modified_base 18: mod_base = OTHER; note = uridine-3'-phosphate
  modified_base 19: mod_base = OTHER; note = uridine-3'-phosphate
  misc_feature 1..19: note = RNA
  misc_feature 20..21: note = DNA
caaaagtgtaacacgtgtttt

SEQ ID NO: 1864 - DNA, 21 bp, synthetic construct
  source 1..21: mol_type = other DNA
  modified_base 1: mod_base = OTHER; note = adenosine-3'-phosphate
  modified_base 2: mod_base = OTHER; note = adenosine-3'-phosphate
  modified_base 3: mod_base = OTHER; note = cytidine-3'-phosphate
  modified_base 4: mod_base = OTHER; note = adenosine-3'-phosphate
  modified_base 5: mod_base = OTHER; note = cytidine-3'-phosphate
  modified_base 6: mod_base = OTHER; note = guanosine-3'-phosphate
  modified_base 7: mod_base = OTHER; note = uridine-3'-phosphate
  modified_base 8: mod_base = OTHER; note = guanosine-3'-phosphate
  modified_base 9: mod_base = OTHER; note = uridine-3'-phosphate
  modified_base 10: mod_base = OTHER; note = uridine-3'-phosphate
  modified_base 11: mod_base = OTHER; note = guanosine-3'-phosphate
  modified_base 12: mod_base = OTHER; note = adenosine-3'-phosphate
  modified_base 13: mod_base = OTHER; note = uridine-3'-phosphate
  modified_base 14: mod_base = OTHER; note = guanosine-3'-phosphate
  modified_base 15: mod_base = OTHER; note = adenosine-3'-phosphate
  modified_base 16: mod_base = OTHER; note = uridine-3'-phosphate
  modified_base 17: mod_base = OTHER; note = guanosine-3'-phosphate
  modified_base 18: mod_base = OTHER; note = guanosine-3'-phosphate
  modified_base 19: mod_base = OTHER; note = adenosine-3'-phosphate
  misc_feature 1..19: note = RNA
  misc_feature 20..21: note = DNA
aacacgtgttgatgatggatt

SEQ ID NO: 1865 - DNA, 21 bp, synthetic construct
  source 1..21: mol_type = other DNA
  modified_base 1: mod_base = OTHER; note = uridine-3'-phosphate
  modified_base 2: mod_base = OTHER; note = guanosine-3'-phosphate
  modified_base 3: mod_base = OTHER; note = adenosine-3'-phosphate
  modified_base 4: mod_base = OTHER; note = uridine-3'-phosphate
  modified_base 5: mod_base = OTHER; note = guanosine-3'-phosphate
  modified_base 6: mod_base = OTHER; note = guanosine-3'-phosphate
  modified_base 7: mod_base = OTHER; note = adenosine-3'-phosphate
  modified_base 8: mod_base = OTHER; note = guanosine-3'-phosphate
  modified_base 9: mod_base = OTHER; note = uridine-3'-phosphate
  modified_base 10: mod_base = OTHER; note = adenosine-3'-phosphate
  modified_base 11: mod_base = OTHER; note = guanosine-3'-phosphate
  modified_base 12: mod_base = OTHER; note = cytidine-3'-phosphate
  modified_base 13: mod_base = OTHER; note = uridine-3'-phosphate
  modified_base 14: mod_base = OTHER; note = uridine-3'-phosphate
  modified_base 15: mod_base = OTHER; note = cytidine-3'-phosphate
  modified_base 16: mod_base = OTHER; note = cytidine-3'-phosphate
  modified_base 17: mod_base = OTHER; note = uridine-3'-phosphate
  modified_base 18: mod_base = OTHER; note = uridine-3'-phosphate
  modified_base 19: mod_base = OTHER; note = uridine-3'-phosphate
  misc_feature 1..19: note = RNA
  misc_feature 20..21: note = DNA
tgatggagtagcttccttttt

SEQ ID NO: 1866 - DNA, 21 bp, synthetic construct
  source 1..21: mol_type = other DNA
  modified_base 1: mod_base = OTHER; note = guanosine-3'-phosphate
  modified_base 2: mod_base = OTHER; note = uridine-3'-phosphate
  modified_base 3: mod_base = OTHER; note = adenosine-3'-phosphate
  modified_base 4: mod_base = OTHER; note = guanosine-3'-phosphate
  modified_base 5: mod_base = OTHER; note = cytidine-3'-phosphate
  modified_base 6: mod_base = OTHER; note = uridine-3'-phosphate
  modified_base 7: mod_base = OTHER; note = uridine-3'-phosphate
  modified_base 8: mod_base = OTHER; note = cytidine-3'-phosphate
  modified_base 9: mod_base = OTHER; note = cytidine-3'-phosphate
  modified_base 10: mod_base = OTHER; note = uridine-3'-phosphate
  modified_base 11: mod_base = OTHER; note = uridine-3'-phosphate
  modified_base 12: mod_base = OTHER; note = uridine-3'-phosphate
  modified_base 13: mod_base = OTHER; note = guanosine-3'-phosphate
  modified_base 14: mod_base = OTHER; note = uridine-3'-phosphate
  modified_base 15: mod_base = OTHER; note = guanosine-3'-phosphate
  modified_base 16: mod_base = OTHER; note = cytidine-3'-phosphate
  modified_base 17: mod_base = OTHER; note = uridine-3'-phosphate
  modified_base 18: mod_base = OTHER; note = uridine-3'-phosphate
  modified_base 19: mod_base = OTHER; note = adenosine-3'-phosphate
  misc_feature 1..19: note = RNA
  misc_feature 20..21: note = DNA
gtagcttcctttgtgcttatt

SEQ ID NO: 1867 - DNA, 21 bp, synthetic construct
  source 1..21: mol_type = other DNA
  modified_base 1: mod_base = OTHER; note = guanosine-3'-phosphate
  modified_base 2: mod_base = OTHER; note = cytidine-3'-phosphate
  modified_base 3: mod_base = OTHER; note = uridine-3'-phosphate
  modified_base 4: mod_base = OTHER; note = uridine-3'-phosphate
  modified_base 5: mod_base = OTHER; note = adenosine-3'-phosphate
  modified_base 6: mod_base = OTHER; note = adenosine-3'-phosphate
  modified_base 7: mod_base = OTHER; note = uridine-3'-phosphate
  modified_base 8: mod_base = OTHER; note = cytidine-3'-phosphate
  modified_base 9: mod_base = OTHER; note = uridine-3'-phosphate
  modified_base 10: mod_base = OTHER; note = cytidine-3'-phosphate
  modified_base 11: mod_base = OTHER; note = cytidine-3'-phosphate
  modified_base 12: mod_base = OTHER; note = cytidine-3'-phosphate
  modified_base 13: mod_base = OTHER; note = adenosine-3'-phosphate
  modified_base 14: mod_base = OTHER; note = uridine-3'-phosphate
  modified_base 15: mod_base = OTHER; note = cytidine-3'-phosphate
  modified_base 16: mod_base = OTHER; note = uridine-3'-phosphate
  modified_base 17: mod_base = OTHER; note = guanosine-3'-phosphate
  modified_base 18: mod_base = OTHER; note = guanosine-3'-phosphate
  modified_base 19: mod_base = OTHER; note = adenosine-3'-phosphate
  misc_feature 1..19: note = RNA
  misc_feature 20..21: note = DNA
gcttaatctcccatctggatt

SEQ ID NO: 1868 - DNA, 21 bp, synthetic construct
  source 1..21: mol_type = other DNA
  modified_base 1: mod_base = OTHER; note = cytidine-3'-phosphate
  modified_base 2: mod_base = OTHER; note = cytidine-3'-phosphate
  modified_base 3: mod_base = OTHER; note = adenosine-3'-phosphate
  modified_base 4: mod_base = OTHER; note = uridine-3'-phosphate
  modified_base 5: mod_base = OTHER; note = cytidine-3'-phosphate
  modified_base 6: mod_base = OTHER; note = uridine-3'-phosphate
  modified_base 7: mod_base = OTHER; note = guanosine-3'-phosphate
  modified_base 8: mod_base = OTHER; note = guanosine-3'-phosphate
  modified_base 9: mod_base = OTHER; note = adenosine-3'-phosphate
  modified_base 10: mod_base = OTHER; note = guanosine-3'-phosphate
  modified_base 11: mod_base = OTHER; note = uridine-3'-phosphate
  modified_base 12: mod_base = OTHER; note = guanosine-3'-phosphate
  modified_base 13: mod_base = OTHER; note = adenosine-3'-phosphate
  modified_base 14: mod_base = OTHER; note = cytidine-3'-phosphate
  modified_base 15: mod_base = OTHER; note = guanosine-3'-phosphate
  modified_base 16: mod_base = OTHER; note = guanosine-3'-phosphate
  modified_base 17: mod_base = OTHER; note = uridine-3'-phosphate
  modified_base 18: mod_base = OTHER; note = guanosine-3'-phosphate
  modified_base 19: mod_base = OTHER; note = cytidine-3'-phosphate
  misc_feature 1..19: note = RNA
  misc_feature 20..21: note = DNA
ccatctggagtgacggtgctt

SEQ ID NO: 1869 - DNA, 21 bp, synthetic construct
  source 1..21: mol_type = other DNA
  modified_base 1: mod_base = OTHER; note = uridine-3'-phosphate
  modified_base 2: mod_base = OTHER; note = guanosine-3'-phosphate
  modified_base 3: mod_base = OTHER; note = adenosine-3'-phosphate
  modified_base 4: mod_base = OTHER; note = cytidine-3'-phosphate
  modified_base 5: mod_base = OTHER; note = guanosine-3'-phosphate
  modified_base 6: mod_base = OTHER; note = guanosine-3'-phosphate
  modified_base 7: mod_base = OTHER; note = uridine-3'-phosphate
  modified_base 8: mod_base = OTHER; note = guanosine-3'-phosphate
  modified_base 9: mod_base = OTHER; note = cytidine-3'-phosphate
  modified_base 10: mod_base = OTHER; note = uridine-3'-phosphate
  modified_base 11: mod_base = OTHER; note = guanosine-3'-phosphate
  modified_base 12: mod_base = OTHER; note = guanosine-3'-phosphate
  modified_base 13: mod_base = OTHER; note = adenosine-3'-phosphate
  modified_base 14: mod_base = OTHER; note = guanosine-3'-phosphate
  modified_base 15: mod_base = OTHER; note = uridine-3'-phosphate
  modified_base 16: mod_base = OTHER; note = uridine-3'-phosphate
  modified_base 17: mod_base = OTHER; note = uridine-3'-phosphate
  modified_base 18: mod_base = OTHER; note = adenosine-3'-phosphate
  modified_base 19: mod_base = OTHER; note = adenosine-3'-phosphate
  misc_feature 1..19: note = RNA
  misc_feature 20..21: note = DNA
tgacggtgctggagtttaatt

SEQ ID NO: 1870 - DNA, 21 bp, synthetic construct
  source 1..21: mol_type = other DNA
  modified_base 1: mod_base = OTHER; note = guanosine-3'-phosphate
  modified_base 2: mod_base = OTHER; note = cytidine-3'-phosphate
  modified_base 3: mod_base = OTHER; note = uridine-3'-phosphate
  modified_base 4: mod_base = OTHER; note = guanosine-3'-phosphate
  modified_base 5: mod_base = OTHER; note = guanosine-3'-phosphate
  modified_base 6: mod_base = OTHER; note = adenosine-3'-phosphate
  modified_base 7: mod_base = OTHER; note = guanosine-3'-phosphate
  modified_base 8: mod_base = OTHER; note = uridine-3'-phosphate
  modified_base 9: mod_base = OTHER; note = uridine-3'-phosphate
  modified_base 10: mod_base = OTHER; note = uridine-3'-phosphate
  modified_base 11: mod_base = OTHER; note = adenosine-3'-phosphate
  modified_base 12: mod_base = OTHER; note = adenosine-3'-phosphate
  modified_base 13: mod_base = OTHER; note = uridine-3'-phosphate
  modified_base 14: mod_base = OTHER; note = guanosine-3'-phosphate
  modified_base 15: mod_base = OTHER; note = uridine-3'-phosphate
  modified_base 16: mod_base = OTHER; note = cytidine-3'-phosphate
  modified_base 17: mod_base = OTHER; note = adenosine-3'-phosphate
  modified_base 18: mod_base = OTHER; note = adenosine-3'-phosphate
  modified_base 19: mod_base = OTHER; note = adenosine-3'-phosphate
  misc_feature 1..19: note = RNA
  misc_feature 20..21: note = DNA
gctggagtttaatgtcaaatt

SEQ ID NO: 1871 - DNA, 21 bp, synthetic construct
  source 1..21: mol_type = other DNA
  modified_base 1: mod_base = OTHER; note = uridine-3'-phosphate
  modified_base 2: mod_base = OTHER; note = guanosine-3'-phosphate
  modified_base 3: mod_base = OTHER; note = uridine-3'-phosphate
  modified_base 4: mod_base = OTHER; note = cytidine-3'-phosphate
  modified_base 5: mod_base = OTHER; note = adenosine-3'-phosphate
  modified_base 6: mod_base = OTHER; note = adenosine-3'-phosphate
  modified_base 7: mod_base = OTHER; note = adenosine-3'-phosphate
  modified_base 8: mod_base = OTHER; note = adenosine-3'-phosphate
  modified_base 9: mod_base = OTHER; note = cytidine-3'-phosphate
  modified_base 10: mod_base = OTHER; note = uridine-3'-phosphate
  modified_base 11: mod_base = OTHER; note = guanosine-3'-phosphate
  modified_base 12: mod_base = OTHER; note = adenosine-3'-phosphate
  modified_base 13: mod_base = OTHER; note = uridine-3'-phosphate
  modified_base 14: mod_base = OTHER; note = guanosine-3'-phosphate
  modified_base 15: mod_base = OTHER; note = cytidine-3'-phosphate
  modified_base 16: mod_base = OTHER; note = uridine-3'-phosphate
  modified_base 17: mod_base = OTHER; note = cytidine-3'-phosphate
  modified_base 18: mod_base = OTHER; note = cytidine-3'-phosphate
  modified_base 19: mod_base = OTHER; note = adenosine-3'-phosphate
  misc_feature 1..19: note = RNA
  misc_feature 20..21: note = DNA
tgtcaaaactgatgctccatt

SEQ ID NO: 1872 - DNA, 21 bp, synthetic construct
  source 1..21: mol_type = other DNA
  modified_base 1: mod_base = OTHER; note = guanosine-3'-phosphate
  modified_base 2: mod_base = OTHER; note = adenosine-3'-phosphate
  modified_base 3: mod_base = OTHER; note = uridine-3'-phosphate
  modified_base 4: mod_base = OTHER; note = guanosine-3'-phosphate
  modified_base 5: mod_base = OTHER; note = cytidine-3'-phosphate
  modified_base 6: mod_base = OTHER; note = uridine-3'-phosphate
  modified_base 7: mod_base = OTHER; note = cytidine-3'-phosphate
  modified_base 8: mod_base = OTHER; note = cytidine-3'-phosphate
  modified_base 9: mod_base = OTHER; note = adenosine-3'-phosphate
  modified_base 10: mod_base = OTHER; note = guanosine-3'-phosphate
  modified_base 11: mod_base = OTHER; note = adenosine-3'-phosphate
  modified_base 12: mod_base = OTHER; note = uridine-3'-phosphate
  modified_base 13: mod_base = OTHER; note = cytidine-3'-phosphate
  modified_base 14: mod_base = OTHER; note = uridine-3'-phosphate
  modified_base 15: mod_base = OTHER; note = uridine-3'-phosphate
  modified_base 16: mod_base = OTHER; note = cytidine-3'-phosphate
  modified_base 17: mod_base = OTHER; note = cytidine-3'-phosphate
  modified_base 18: mod_base = OTHER; note = adenosine-3'-phosphate
  modified_base 19: mod_base = OTHER; note = guanosine-3'-phosphate
  misc_feature 1..19: note = RNA
  misc_feature 20..21: note = DNA
gatgctccagatcttccagtt

SEQ ID NO: 1873 - DNA, 21 bp, synthetic construct
  source 1..21: mol_type = other DNA
  modified_base 1: mod_base = OTHER; note = cytidine-3'-phosphate
  modified_base 2: mod_base = OTHER; note = adenosine-3'-phosphate
  modified_base 3: mod_base = OTHER; note = guanosine-3'-phosphate
  modified_base 4: mod_base = OTHER; note = adenosine-3'-phosphate
  modified_base 5: mod_base = OTHER; note = uridine-3'-phosphate
  modified_base 6: mod_base = OTHER; note = cytidine-3'-phosphate
  modified_base 7: mod_base = OTHER; note = uridine-3'-phosphate
  modified_base 8: mod_base = OTHER; note = uridine-3'-phosphate
  modified_base 9: mod_base = OTHER; note = cytidine-3'-phosphate
  modified_base 10: mod_base = OTHER; note = cytidine-3'-phosphate
  modified_base 11: mod_base = OTHER; note = adenosine-3'-phosphate
  modified_base 12: mod_base = OTHER; note = guanosine-3'-phosphate
  modified_base 13: mod_base = OTHER; note = adenosine-3'-phosphate
  modified_base 14: mod_base = OTHER; note = adenosine-3'-phosphate
  modified_base 15: mod_base = OTHER; note = guanosine-3'-phosphate
  modified_base 16: mod_base = OTHER; note = adenosine-3'-phosphate
  modified_base 17: mod_base = OTHER; note = adenosine-3'-phosphate
  modified_base 18: mod_base = OTHER; note = adenosine-3'-phosphate
  modified_base 19: mod_base = OTHER; note = adenosine-3'-phosphate
  misc_feature 1..19: note = RNA
  misc_feature 20..21: note = DNA
cagatcttccagaagaaaatt

SEQ ID NO: 1874 - DNA, 21 bp, synthetic construct
  source 1..21: mol_type = other DNA
  modified_base 1: mod_base = OTHER; note = adenosine-3'-phosphate
  modified_base 2: mod_base = OTHER; note = guanosine-3'-phosphate
  modified_base 3: mod_base = OTHER; note = adenosine-3'-phosphate
  modified_base 4: mod_base = OTHER; note = adenosine-3'-phosphate
  modified_base 5: mod_base = OTHER; note = adenosine-3'-phosphate
  modified_base 6: mod_base = OTHER; note = adenosine-3'-phosphate
  modified_base 7: mod_base = OTHER; note = uridine-3'-phosphate
  modified_base 8: mod_base = OTHER; note = cytidine-3'-phosphate
  modified_base 9: mod_base = OTHER; note = adenosine-3'-phosphate
  modified_base 10: mod_base = OTHER; note = guanosine-3'-phosphate
  modified_base 11: mod_base = OTHER; note = guanosine-3'-phosphate
  modified_base 12: mod_base = OTHER; note = cytidine-3'-phosphate
  modified_base 13: mod_base = OTHER; note = cytidine-3'-phosphate
  modified_base 14: mod_base = OTHER; note = adenosine-3'-phosphate
  modified_base 15: mod_base = OTHER; note = guanosine-3'-phosphate
  modified_base 16: mod_base = OTHER; note = guanosine-3'-phosphate
  modified_base 17: mod_base = OTHER; note = guanosine-3'-phosphate
  modified_base 18: mod_base = OTHER; note = adenosine-3'-phosphate
  modified_base 19: mod_base = OTHER; note = adenosine-3'-phosphate
  misc_feature 1..19: note = RNA
  misc_feature 20..21: note = DNA
agaaaatcaggccagggaatt

SEQ ID NO: 1875 - DNA, 21 bp, synthetic construct
  source 1..21: mol_type = other DNA
  modified_base 1: mod_base = OTHER; note = guanosine-3'-phosphate
  modified_base 2: mod_base = OTHER; note = guanosine-3'-phosphate
  modified_base 3: mod_base = OTHER; note = cytidine-3'-phosphate
  modified_base 4: mod_base = OTHER; note = cytidine-3'-phosphate
  modified_base 5: mod_base = OTHER; note = adenosine-3'-phosphate
  modified_base 6: mod_base = OTHER; note = guanosine-3'-phosphate
  modified_base 7: mod_base = OTHER; note = guanosine-3'-phosphate
  modified_base 8: mod_base = OTHER; note = guanosine-3'-phosphate
  modified_base 9: mod_base = OTHER; note = adenosine-3'-phosphate
  modified_base 10: mod_base = OTHER; note = adenosine-3'-phosphate
  modified_base 11: mod_base = OTHER; note = guanosine-3'-phosphate
  modified_base 12: mod_base = OTHER; note = guanosine-3'-phosphate
  modified_base 13: mod_base = OTHER; note = uridine-3'-phosphate
  modified_base 14: mod_base = OTHER; note = uridine-3'-phosphate
  modified_base 15: mod_base = OTHER; note = adenosine-3'-phosphate
  modified_base 16: mod_base = OTHER; note = cytidine-3'-phosphate
  modified_base 17: mod_base = OTHER; note = cytidine-3'-phosphate
  modified_base 18: mod_base = OTHER; note = guanosine-3'-phosphate
  modified_base 19: mod_base = OTHER; note = adenosine-3'-phosphate
  misc_feature 1..19: note = RNA
  misc_feature 20..21: note = DNA
ggccagggaaggttaccgatt

SEQ ID NO: 1876 - DNA, 21 bp, synthetic construct
  source 1..21: mol_type = other DNA
  modified_base 1: mod_base = OTHER; note = guanosine-3'-phosphate
  modified_base 2: mod_base = OTHER; note = uridine-3'-phosphate
  modified_base 3: mod_base = OTHER; note = uridine-3'-phosphate
  modified_base 4: mod_base = OTHER; note = adenosine-3'-phosphate
  modified_base 5: mod_base = OTHER; note = cytidine-3'-phosphate
  modified_base 6: mod_base = OTHER; note = cytidine-3'-phosphate
  modified_base 7: mod_base = OTHER; note = guanosine-3'-phosphate
  modified_base 8: mod_base = OTHER; note = adenosine-3'-phosphate
  modified_base 9: mod_base = OTHER; note = guanosine-3'-phosphate
  modified_base 10: mod_base = OTHER; note = cytidine-3'-phosphate
  modified_base 11: mod_base = OTHER; note = adenosine-3'-phosphate
  modified_base 12: mod_base = OTHER; note = adenosine-3'-phosphate
  modified_base 13: mod_base = OTHER; note = uridine-3'-phosphate
  modified_base 14: mod_base = OTHER; note = adenosine-3'-phosphate
  modified_base 15: mod_base = OTHER; note = guanosine-3'-phosphate
  modified_base 16: mod_base = OTHER; note = cytidine-3'-phosphate
  modified_base 17: mod_base = OTHER; note = adenosine-3'-phosphate
  modified_base 18: mod_base = OTHER; note = uridine-3'-phosphate
  modified_base 19: mod_base = OTHER; note = adenosine-3'-phosphate
  misc_feature 1..19: note = RNA
  misc_feature 20..21: note = DNA
gttaccgagcaatagcatatt

SEQ ID NO: 1877 - DNA, 21 bp, synthetic construct
  source 1..21: mol_type = other DNA
  modified_base 1: mod_base = OTHER; note = adenosine-3'-phosphate
  modified_base 2: mod_base = OTHER; note = uridine-3'-phosphate
  modified_base 3: mod_base = OTHER; note = adenosine-3'-phosphate
  modified_base 4: mod_base = OTHER; note = guanosine-3'-phosphate
  modified_base 5: mod_base = OTHER; note = cytidine-3'-phosphate
  modified_base 6: mod_base = OTHER; note = adenosine-3'-phosphate
  modified_base 7: mod_base = OTHER; note = uridine-3'-phosphate
  modified_base 8: mod_base = OTHER; note = adenosine-3'-phosphate
  modified_base 9: mod_base = OTHER; note = cytidine-3'-phosphate
  modified_base 10: mod_base = OTHER; note = uridine-3'-phosphate
  modified_base 11: mod_base = OTHER; note = cytidine-3'-phosphate
  modified_base 12: mod_base = OTHER; note = adenosine-3'-phosphate
  modified_base 13: mod_base = OTHER; note = uridine-3'-phosphate
  modified_base 14: mod_base = OTHER; note = cytidine-3'-phosphate
  modified_base 15: mod_base = OTHER; note = uridine-3'-phosphate
  modified_base 16: mod_base = OTHER; note = cytidine-3'-phosphate
  modified_base 17: mod_base = OTHER; note = uridine-3'-phosphate
  modified_base 18: mod_base = OTHER; note = cytidine-3'-phosphate
  modified_base 19: mod_base = OTHER; note = adenosine-3'-phosphate
  misc_feature 1..19: note = RNA
  misc_feature 20..21: note = DNA
atagcatactcatctctcatt

SEQ ID NO: 1878 - DNA, 21 bp, synthetic construct
  source 1..21: mol_type = other DNA
  modified_base 1: mod_base = OTHER; note = uridine-3'-phosphate
  modified_base 2: mod_base = OTHER; note = adenosine-3'-phosphate
  modified_base 3: mod_base = OTHER; note = cytidine-3'-phosphate
  modified_base 4: mod_base = OTHER; note = uridine-3'-phosphate
  modified_base 5: mod_base = OTHER; note = cytidine-3'-phosphate
  modified_base 6: mod_base = OTHER; note = adenosine-3'-phosphate
  modified_base 7: mod_base = OTHER; note = uridine-3'-phosphate
  modified_base 8: mod_base = OTHER; note = cytidine-3'-phosphate
  modified_base 9: mod_base = OTHER; note = uridine-3'-phosphate
  modified_base 10: mod_base = OTHER; note = cytidine-3'-phosphate
  modified_base 11: mod_base = OTHER; note = uridine-3'-phosphate
  modified_base 12: mod_base = OTHER; note = cytidine-3'-phosphate
  modified_base 13: mod_base = OTHER; note = adenosine-3'-phosphate
  modified_base 14: mod_base = OTHER; note = guanosine-3'-phosphate
  modified_base 15: mod_base = OTHER; note = cytidine-3'-phosphate
  modified_base 16: mod_base = OTHER; note = cytidine-3'-phosphate
  modified_base 17: mod_base = OTHER; note = adenosine-3'-phosphate
  modified_base 18: mod_base = OTHER; note = adenosine-3'-phosphate
  modified_base 19: mod_base = OTHER; note = adenosine-3'-phosphate
  misc_feature 1..19: note = RNA
  misc_feature 20..21: note = DNA
tactcatctctcagccaaatt

SEQ ID NO: 1879 - DNA, 21 bp, synthetic construct
  source 1..21: mol_type = other DNA
  modified_base 1: mod_base = OTHER; note = guanosine-3'-phosphate
  modified_base 2: mod_base = OTHER; note = cytidine-3'-phosphate
  modified_base 3: mod_base = OTHER; note = cytidine-3'-phosphate
  modified_base 4: mod_base = OTHER; note = adenosine-3'-phosphate
  modified_base 5: mod_base = OTHER; note = adenosine-3'-phosphate
  modified_base 6: mod_base = OTHER; note = adenosine-3'-phosphate
  modified_base 7: mod_base = OTHER; note = guanosine-3'-phosphate
  modified_base 8: mod_base = OTHER; note = uridine-3'-phosphate
  modified_base 9: mod_base = OTHER; note = uridine-3'-phosphate
  modified_base 10: mod_base = OTHER; note = adenosine-3'-phosphate
  modified_base 11: mod_base = OTHER; note = cytidine-3'-phosphate
  modified_base 12: mod_base = OTHER; note = cytidine-3'-phosphate
  modified_base 13: mod_base = OTHER; note = uridine-3'-phosphate
  modified_base 14: mod_base = OTHER; note = uridine-3'-phosphate
  modified_base 15: mod_base = OTHER; note = uridine-3'-phosphate
  modified_base 16: mod_base = OTHER; note = adenosine-3'-phosphate
  modified_base 17: mod_base = OTHER; note = uridine-3'-phosphate
  modified_base 18: mod_base = OTHER; note = adenosine-3'-phosphate
  modified_base 19: mod_base = OTHER; note = uridine-3'-phosphate
  misc_feature 1..19: note = RNA
  misc_feature 20..21: note = DNA
gccaaagttacctttatattt

SEQ ID NO: 1880 - DNA, 21 bp, synthetic construct
  source 1..21: mol_type = other DNA
  modified_base 1: mod_base = OTHER; note = cytidine-3'-phosphate
  modified_base 2: mod_base = OTHER; note = cytidine-3'-phosphate
  modified_base 3: mod_base = OTHER; note = uridine-3'-phosphate
  modified_base 4: mod_base = OTHER; note = uridine-3'-phosphate
  modified_base 5: mod_base = OTHER; note = uridine-3'-phosphate
  modified_base 6: mod_base = OTHER; note = adenosine-3'-phosphate
  modified_base 7: mod_base = OTHER; note = uridine-3'-phosphate
  modified_base 8: mod_base = OTHER; note = adenosine-3'-phosphate
  modified_base 9: mod_base = OTHER; note = uridine-3'-phosphate
  modified_base 10: mod_base = OTHER; note = uridine-3'-phosphate
  modified_base 11: mod_base = OTHER; note = guanosine-3'-phosphate
  modified_base 12: mod_base = OTHER; note = adenosine-3'-phosphate
  modified_base 13: mod_base = OTHER; note = uridine-3'-phosphate
  modified_base 14: mod_base = OTHER; note = uridine-3'-phosphate
  modified_base 15: mod_base = OTHER; note = guanosine-3'-phosphate
  modified_base 16: mod_base = OTHER; note = guanosine-3'-phosphate
  modified_base 17: mod_base = OTHER; note = adenosine-3'-phosphate
  modified_base 18: mod_base = OTHER; note = cytidine-3'-phosphate
  modified_base 19: mod_base = OTHER; note = uridine-3'-phosphate
  misc_feature 1..19: note = RNA
  misc_feature 20..21: note = DNA
cctttatattgattggacttt

SEQ ID NO: 1881 - DNA, 21 bp, synthetic construct
  source 1..21: mol_type = other DNA
  modified_base 1: mod_base = OTHER; note = guanosine-3'-phosphate
  modified_base 2: mod_base = OTHER; note = adenosine-3'-phosphate
  modified_base 3: mod_base = OTHER; note = uridine-3'-phosphate
  modified_base 4: mod_base = OTHER; note = uridine-3'-phosphate
  modified_base 5: mod_base = OTHER; note = guanosine-3'-phosphate
  modified_base 6: mod_base = OTHER; note = guanosine-3'-phosphate
  modified_base 7: mod_base = OTHER; note = adenosine-3'-phosphate
  modified_base 8: mod_base = OTHER; note = cytidine-3'-phosphate
  modified_base 9: mod_base = OTHER; note = uridine-3'-phosphate
  modified_base 10: mod_base = OTHER; note = guanosine-3'-phosphate
  modified_base 11: mod_base = OTHER; note = adenosine-3'-phosphate
  modified_base 12: mod_base = OTHER; note = uridine-3'-phosphate
  modified_base 13: mod_base = OTHER; note = adenosine-3'-phosphate
  modified_base 14: mod_base = OTHER; note = adenosine-3'-phosphate
  modified_base 15: mod_base = OTHER; note = cytidine-3'-phosphate
  modified_base 16: mod_base = OTHER; note = cytidine-3'-phosphate
  modified_base 17: mod_base = OTHER; note = adenosine-3'-phosphate
  modified_base 18: mod_base = OTHER; note = uridine-3'-phosphate
  modified_base 19: mod_base = OTHER; note = adenosine-3'-phosphate
  misc_feature 1..19: note = RNA
  misc_feature 20..21: note = DNA
gattggactgataaccatatt

SEQ ID NO: 1882 - DNA, 21 bp, synthetic construct
  source 1..21: mol_type = other DNA
  modified_base 1: mod_base = OTHER; note = cytidine-3'-phosphate
  modified_base 2: mod_base = OTHER; note = uridine-3'-phosphate
  modified_base 3: mod_base = OTHER; note = guanosine-3'-phosphate
  modified_base 4: mod_base = OTHER; note = adenosine-3'-phosphate
  modified_base 5: mod_base = OTHER; note = uridine-3'-phosphate
  modified_base 6: mod_base = OTHER; note = adenosine-3'-phosphate
  modified_base 7: mod_base = OTHER; note = adenosine-3'-phosphate
  modified_base 8: mod_base = OTHER; note = cytidine-3'-phosphate
  modified_base 9: mod_base = OTHER; note = cytidine-3'-phosphate
  modified_base 10: mod_base = OTHER; note = adenosine-3'-phosphate
  modified_base 11: mod_base = OTHER; note = uridine-3'-phosphate
  modified_base 12: mod_base = OTHER; note = adenosine-3'-phosphate
  modified_base 13: mod_base = OTHER; note = adenosine-3'-phosphate
  modified_base 14: mod_base = OTHER; note = guanosine-3'-phosphate
  modified_base 15: mod_base = OTHER; note = guanosine-3'-phosphate
  modified_base 16: mod_base = OTHER; note = cytidine-3'-phosphate
  modified_base 17: mod_base = OTHER; note = uridine-3'-phosphate
  modified_base 18: mod_base = OTHER; note = uridine-3'-phosphate
  modified_base 19: mod_base = OTHER; note = uridine-3'-phosphate
  misc_feature 1..19: note = RNA
  misc_feature 20..21: note = DNA
ctgataaccataaggcttttt

SEQ ID NO: 1883 - DNA, 21 bp, synthetic construct
  source 1..21: mol_type = other DNA
  modified_base 1: mod_base = OTHER; note = adenosine-3'-phosphate
  modified_base 2: mod_base = OTHER; note = guanosine-3'-phosphate
  modified_base 3: mod_base = OTHER; note = guanosine-3'-phosphate
  modified_base 4: mod_base = OTHER; note = cytidine-3'-phosphate
  modified_base 5: mod_base = OTHER; note = uridine-3'-phosphate
  modified_base 6: mod_base = OTHER; note = uridine-3'-phosphate
  modified_base 7: mod_base = OTHER; note = uridine-3'-phosphate
  modified_base 8: mod_base = OTHER; note = guanosine-3'-phosphate
  modified_base 9: mod_base = OTHER; note = cytidine-3'-phosphate
  modified_base 10: mod_base = OTHER; note = uridine-3'-phosphate
  modified_base 11: mod_base = OTHER; note = adenosine-3'-phosphate
  modified_base 12: mod_base = OTHER; note = guanosine-3'-phosphate
  modified_base 13: mod_base = OTHER; note = uridine-3'-phosphate
  modified_base 14: mod_base = OTHER; note = guanosine-3'-phosphate
  modified_base 15: mod_base = OTHER; note = guanosine-3'-phosphate
  modified_base 16: mod_base = OTHER; note = guanosine-3'-phosphate
  modified_base 17: mod_base = OTHER; note = adenosine-3'-phosphate
  modified_base 18: mod_base = OTHER; note = guanosine-3'-phosphate
  modified_base 19: mod_base = OTHER; note = adenosine-3'-phosphate
  misc_feature 1..19: note = RNA
  misc_feature 20..21: note = DNA
aggctttgctagtgggagatt

SEQ ID NO: 1884 - DNA, 21 bp, synthetic construct
  source 1..21: mol_type = other DNA
  modified_base 1: mod_base = OTHER; note = guanosine-3'-phosphate
  modified_base 2: mod_base = OTHER; note = uridine-3'-phosphate
  modified_base 3: mod_base = OTHER; note = guanosine-3'-phosphate
  modified_base 4: mod_base = OTHER; note = guanosine-3'-phosphate
  modified_base 5: mod_base = OTHER; note = guanosine-3'-phosphate
  modified_base 6: mod_base = OTHER; note = adenosine-3'-phosphate
  modified_base 7: mod_base = OTHER; note = guanosine-3'-phosphate
  modified_base 8: mod_base = OTHER; note = adenosine-3'-phosphate
  modified_base 9: mod_base = OTHER; note = adenosine-3'-phosphate
  modified_base 10: mod_base = OTHER; note = cytidine-3'-phosphate
  modified_base 11: mod_base = OTHER; note = adenosine-3'-phosphate
  modified_base 12: mod_base = OTHER; note = uridine-3'-phosphate
  modified_base 13: mod_base = OTHER; note = cytidine-3'-phosphate
  modified_base 14: mod_base = OTHER; note = uridine-3'-phosphate
  modified_base 15: mod_base = OTHER; note = guanosine-3'-phosphate
  modified_base 16: mod_base = OTHER; note = adenosine-3'-phosphate
  modified_base 17: mod_base = OTHER; note = adenosine-3'-phosphate
  modified_base 18: mod_base = OTHER; note = uridine-3'-phosphate
  modified_base 19: mod_base = OTHER; note = adenosine-3'-phosphate
  misc_feature 1..19: note = RNA
  misc_feature 20..21: note = DNA
gtgggagaacatctgaatatt

SEQ ID NO: 1885 - DNA, 21 bp, synthetic construct
  source 1..21: mol_type = other DNA
  modified_base 1: mod_base = OTHER; note = cytidine-3'-phosphate
  modified_base 2: mod_base = OTHER; note = adenosine-3'-phosphate
  modified_base 3: mod_base = OTHER; note = uridine-3'-phosphate
  modified_base 4: mod_base = OTHER; note = cytidine-3'-phosphate
  modified_base 5: mod_base = OTHER; note = uridine-3'-phosphate
  modified_base 6: mod_base = OTHER; note = guanosine-3'-phosphate
  modified_base 7: mod_base = OTHER; note = adenosine-3'-phosphate
  modified_base 8: mod_base = OTHER; note = adenosine-3'-phosphate
  modified_base 9: mod_base = OTHER; note = uridine-3'-phosphate
  modified_base 10: mod_base = OTHER; note = adenosine-3'-phosphate
  modified_base 11: mod_base = OTHER; note = uridine-3'-phosphate
  modified_base 12: mod_base = OTHER; note = uridine-3'-phosphate
  modified_base 13: mod_base = OTHER; note = adenosine-3'-phosphate
  modified_base 14: mod_base = OTHER; note = uridine-3'-phosphate
  modified_base 15: mod_base = OTHER; note = uridine-3'-phosphate
  modified_base 16: mod_base = OTHER; note = guanosine-3'-phosphate
  modified_base 17: mod_base = OTHER; note = uridine-3'-phosphate
  modified_base 18: mod_base = OTHER; note = uridine-3'-phosphate
  modified_base 19: mod_base = OTHER; note = adenosine-3'-phosphate
  misc_feature 1..19: note = RNA
  misc_feature 20..21: note = DNA
catctgaatattattgttatt

SEQ ID NO: 1886 - DNA, 21 bp, synthetic construct
  source 1..21: mol_type = other DNA
  modified_base 1: mod_base = OTHER; note = uridine-3'-phosphate
  modified_base 2: mod_base = OTHER; note = adenosine-3'-phosphate
  modified_base 3: mod_base = OTHER; note = uridine-3'-phosphate
  modified_base 4: mod_base = OTHER; note = uridine-3'-phosphate
  modified_base 5: mod_base = OTHER; note = adenosine-3'-phosphate
  modified_base 6: mod_base = OTHER; note = uridine-3'-phosphate
  modified_base 7: mod_base = OTHER; note = uridine-3'-phosphate
  modified_base 8: mod_base = OTHER; note = guanosine-3'-phosphate
  modified_base 9: mod_base = OTHER; note = uridine-3'-phosphate
  modified_base 10: mod_base = OTHER; note = uridine-3'-phosphate
  modified_base 11: mod_base = OTHER; note = adenosine-3'-phosphate
  modified_base 12: mod_base = OTHER; note = cytidine-3'-phosphate
  modified_base 13: mod_base = OTHER; note = cytidine-3'-phosphate
  modified_base 14: mod_base = OTHER; note = cytidine-3'-phosphate
  modified_base 15: mod_base = OTHER; note = cytidine-3'-phosphate
  modified_base 16: mod_base = OTHER; note = cytidine-3'-phosphate
  modified_base 17: mod_base = OTHER; note = adenosine-3'-phosphate
  modified_base 18: mod_base = OTHER; note = adenosine-3'-phosphate
  modified_base 19: mod_base = OTHER; note = adenosine-3'-phosphate
  misc_feature 1..19: note = RNA
  misc_feature 20..21: note = DNA
tattattgttacccccaaatt

SEQ ID NO: 1887 - DNA, 21 bp, synthetic construct
  source 1..21: mol_type = other DNA
  modified_base 1: mod_base = OTHER; note = cytidine-3'-phosphate
  modified_base 2: mod_base = OTHER; note = cytidine-3'-phosphate
  modified_base 3: mod_base = OTHER; note = cytidine-3'-phosphate
  modified_base 4: mod_base = OTHER; note = adenosine-3'-phosphate
  modified_base 5: mod_base = OTHER; note = adenosine-3'-phosphate
  modified_base 6: mod_base = OTHER; note = adenosine-3'-phosphate
  modified_base 7: mod_base = OTHER; note = adenosine-3'-phosphate
  modified_base 8: mod_base = OTHER; note = guanosine-3'-phosphate
  modified_base 9: mod_base = OTHER; note = cytidine-3'-phosphate
  modified_base 10: mod_base = OTHER; note = cytidine-3'-phosphate
  modified_base 11: mod_base = OTHER; note = cytidine-3'-phosphate
  modified_base 12: mod_base = OTHER; note = adenosine-3'-phosphate
  modified_base 13: mod_base = OTHER; note = uridine-3'-phosphate
  modified_base 14: mod_base = OTHER; note = adenosine-3'-phosphate
  modified_base 15: mod_base = OTHER; note = uridine-3'-phosphate
  modified_base 16: mod_base = OTHER; note = adenosine-3'-phosphate
  modified_base 17: mod_base = OTHER; note = uridine-3'-phosphate
  modified_base 18: mod_base = OTHER; note = uridine-3'-phosphate
  modified_base 19: mod_base = OTHER; note = guanosine-3'-phosphate
  misc_feature 1..19: note = RNA
  misc_feature 20..21: note = DNA
cccaaaagcccatatattgtt

SEQ ID NO: 1888 - DNA, 21 bp, synthetic construct
  source 1..21: mol_type = other DNA
  modified_base 1: mod_base = OTHER; note = cytidine-3'-phosphate
  modified_base 2: mod_base = OTHER; note = cytidine-3'-phosphate
  modified_base 3: mod_base = OTHER; note = adenosine-3'-phosphate
  modified_base 4: mod_base = OTHER; note = adenosine-3'-phosphate
  modified_base 5: mod_base = OTHER; note = adenosine-3'-phosphate
  modified_base 6: mod_base = OTHER; note = adenosine-3'-phosphate
  modified_base 7: mod_base = OTHER; note = guanosine-3'-phosphate
  modified_base 8: mod_base = OTHER; note = cytidine-3'-phosphate
  modified_base 9: mod_base = OTHER; note = cytidine-3'-phosphate
  modified_base 10: mod_base = OTHER; note = cytidine-3'-phosphate
  modified_base 11: mod_base = OTHER; note = adenosine-3'-phosphate
  modified_base 12: mod_base = OTHER; note = uridine-3'-phosphate
  modified_base 13: mod_base = OTHER; note = adenosine-3'-phosphate
  modified_base 14: mod_base = OTHER; note = uridine-3'-phosphate
  modified_base 15: mod_base = OTHER; note = adenosine-3'-phosphate
  modified_base 16: mod_base = OTHER; note = uridine-3'-phosphate
  modified_base 17: mod_base = OTHER; note = uridine-3'-phosphate
  modified_base 18: mod_base = OTHER; note = guanosine-3'-phosphate
  modified_base 19: mod_base = OTHER; note = adenosine-3'-phosphate
  misc_feature 1..19: note = RNA
  misc_feature 20..21: note = DNA
ccaaaagcccatatattgatt

SEQ ID NO: 1889 - DNA, 21 bp, synthetic construct
  source 1..21: mol_type = other DNA
  modified_base 1: mod_base = OTHER; note = cytidine-3'-phosphate
  modified_base 2: mod_base = OTHER; note = adenosine-3'-phosphate
  modified_base 3: mod_base = OTHER; note = adenosine-3'-phosphate
  modified_base 4: mod_base = OTHER; note = adenosine-3'-phosphate
  modified_base 5: mod_base = OTHER; note = adenosine-3'-phosphate
  modified_base 6: mod_base = OTHER; note = guanosine-3'-phosphate
  modified_base 7: mod_base = OTHER; note = cytidine-3'-phosphate
  modified_base 8: mod_base = OTHER; note = cytidine-3'-phosphate
  modified_base 9: mod_base = OTHER; note = cytidine-3'-phosphate
  modified_base 10: mod_base = OTHER; note = adenosine-3'-phosphate
  modified_base 11: mod_base = OTHER; note = uridine-3'-phosphate
  modified_base 12: mod_base = OTHER; note = adenosine-3'-phosphate
  modified_base 13: mod_base = OTHER; note = uridine-3'-phosphate
  modified_base 14: mod_base = OTHER; note = adenosine-3'-phosphate
  modified_base 15: mod_base = OTHER; note = uridine-3'-phosphate
  modified_base 16: mod_base = OTHER; note = uridine-3'-phosphate
  modified_base 17: mod_base = OTHER; note = guanosine-3'-phosphate
  modified_base 18: mod_base = OTHER; note = adenosine-3'-phosphate
  modified_base 19: mod_base = OTHER; note = cytidine-3'-phosphate
  misc_feature 1..19: note = RNA
  misc_feature 20..21: note = DNA
caaaagcccatatattgactt

SEQ ID NO: 1890 - DNA, 21 bp, synthetic construct
  source 1..21: mol_type = other DNA
  modified_base 1: mod_base = OTHER; note = adenosine-3'-phosphate
  modified_base 2: mod_base = OTHER; note = adenosine-3'-phosphate
  modified_base 3: mod_base = OTHER; note = adenosine-3'-phosphate
  modified_base 4: mod_base = OTHER; note = adenosine-3'-phosphate
  modified_base 5: mod_base = OTHER; note = guanosine-3'-phosphate
  modified_base 6: mod_base = OTHER; note = cytidine-3'-phosphate
  modified_base 7: mod_base = OTHER; note = cytidine-3'-phosphate
  modified_base 8: mod_base = OTHER; note = cytidine-3'-phosphate
  modified_base 9: mod_base = OTHER; note = adenosine-3'-phosphate
  modified_base 10: mod_base = OTHER; note = uridine-3'-phosphate
  modified_base 11: mod_base = OTHER; note = adenosine-3'-phosphate
  modified_base 12: mod_base = OTHER; note = uridine-3'-phosphate
  modified_base 13: mod_base = OTHER; note = adenosine-3'-phosphate
  modified_base 14: mod_base = OTHER; note = uridine-3'-phosphate
  modified_base 15: mod_base = OTHER; note = uridine-3'-phosphate
  modified_base 16: mod_base = OTHER; note = guanosine-3'-phosphate
  modified_base 17: mod_base = OTHER; note = adenosine-3'-phosphate
  modified_base 18: mod_base = OTHER; note = cytidine-3'-phosphate
  modified_base 19: mod_base = OTHER; note = adenosine-3'-phosphate
  misc_feature 1..19: note = RNA
  misc_feature 20..21: note = DNA
aaaagcccatatattgacatt

SEQ ID NO: 1891 - DNA, 21 bp, synthetic construct
  source 1..21: mol_type = other DNA
  modified_base 1: mod_base = OTHER; note = adenosine-3'-phosphate
  modified_base 2: mod_base = OTHER; note = adenosine-3'-phosphate
  modified_base 3: mod_base = OTHER; note = adenosine-3'-phosphate
  modified_base 4: mod_base = OTHER; note = guanosine-3'-phosphate
  modified_base 5: mod_base = OTHER; note = cytidine-3'-phosphate
  modified_base 6: mod_base = OTHER; note = cytidine-3'-phosphate
  modified_base 7: mod_base = OTHER; note = cytidine-3'-phosphate
  modified_base 8: mod_base = OTHER; note = adenosine-3'-phosphate
  modified_base 9: mod_base = OTHER; note = uridine-3'-phosphate
  modified_base 10: mod_base = OTHER; note = adenosine-3'-phosphate
  modified_base 11: mod_base = OTHER; note = uridine-3'-phosphate
  modified_base 12: mod_base = OTHER; note = adenosine-3'-phosphate
  modified_base 13: mod_base = OTHER; note = uridine-3'-phosphate
  modified_base 14: mod_base = OTHER; note = uridine-3'-phosphate
  modified_base 15: mod_base = OTHER; note = guanosine-3'-phosphate
  modified_base 16: mod_base = OTHER; note = adenosine-3'-phosphate
  modified_base 17: mod_base = OTHER; note = cytidine-3'-phosphate
  modified_base 18: mod_base = OTHER; note = adenosine-3'-phosphate
  modified_base 19: mod_base = OTHER; note = adenosine-3'-phosphate
  misc_feature 1..19: note = RNA
  misc_feature 20..21: note = DNA
aaagcccatatattgacaatt

SEQ ID NO: 1892 - DNA, 21 bp, synthetic construct
  source 1..21: mol_type = other DNA
  modified_base 1: mod_base = OTHER; note = adenosine-3'-phosphate
  modified_base 2: mod_base = OTHER; note = adenosine-3'-phosphate
  modified_base 3: mod_base = OTHER; note = guanosine-3'-phosphate
  modified_base 4: mod_base = OTHER; note = cytidine-3'-phosphate
  modified_base 5: mod_base = OTHER; note = cytidine-3'-phosphate
  modified_base 6: mod_base = OTHER; note = cytidine-3'-phosphate
  modified_base 7: mod_base = OTHER; note = adenosine-3'-phosphate
  modified_base 8: mod_base = OTHER; note = uridine-3'-phosphate
  modified_base 9: mod_base = OTHER; note = adenosine-3'-phosphate
  modified_base 10: mod_base = OTHER; note = uridine-3'-phosphate
  modified_base 11: mod_base = OTHER; note = adenosine-3'-phosphate
  modified_base 12: mod_base = OTHER; note = uridine-3'-phosphate
  modified_base 13: mod_base = OTHER; note = uridine-3'-phosphate
  modified_base 14: mod_base = OTHER; note = guanosine-3'-phosphate
  modified_base 15: mod_base = OTHER; note = adenosine-3'-phosphate
  modified_base 16: mod_base = OTHER; note = cytidine-3'-phosphate
  modified_base 17: mod_base = OTHER; note = adenosine-3'-phosphate
  modified_base 18: mod_base = OTHER; note = adenosine-3'-phosphate
  modified_base 19: mod_base = OTHER; note = adenosine-3'-phosphate
  misc_feature 1..19: note = RNA
  misc_feature 20..21: note = DNA
aagcccatatattgacaaatt

SEQ ID NO: 1893 - DNA, 21 bp, synthetic construct
  source 1..21: mol_type = other DNA
  modified_base 1: mod_base = OTHER; note = adenosine-3'-phosphate
  modified_base 2: mod_base = OTHER; note = guanosine-3'-phosphate
  modified_base 3: mod_base = OTHER; note = cytidine-3'-phosphate
  modified_base 4: mod_base = OTHER; note = cytidine-3'-phosphate
  modified_base 5: mod_base = OTHER; note = cytidine-3'-phosphate
  modified_base 6: mod_base = OTHER; note = adenosine-3'-phosphate
  modified_base 7: mod_base = OTHER; note = uridine-3'-phosphate
  modified_base 8: mod_base = OTHER; note = adenosine-3'-phosphate
  modified_base 9: mod_base = OTHER; note = uridine-3'-phosphate
  modified_base 10: mod_base = OTHER; note = adenosine-3'-phosphate
  modified_base 11: mod_base = OTHER; note = uridine-3'-phosphate
  modified_base 12: mod_base = OTHER; note = uridine-3'-phosphate
  modified_base 13: mod_base = OTHER; note = guanosine-3'-phosphate
  modified_base 14: mod_base = OTHER; note = adenosine-3'-phosphate
  modified_base 15: mod_base = OTHER; note = cytidine-3'-phosphate
  modified_base 16: mod_base = OTHER; note = adenosine-3'-phosphate
  modified_base 17: mod_base = OTHER; note = adenosine-3'-phosphate
  modified_base 18: mod_base = OTHER; note = adenosine-3'-phosphate
  modified_base 19: mod_base = OTHER; note = adenosine-3'-phosphate
  misc_feature 1..19: note = RNA
  misc_feature 20..21: note = DNA
agcccatatattgacaaaatt

SEQ ID NO: 1894 - DNA, 21 bp, synthetic construct
  source 1..21: mol_type = other DNA
  modified_base 1: mod_base = OTHER; note = guanosine-3'-phosphate
  modified_base 2: mod_base = OTHER; note = cytidine-3'-phosphate
  modified_base 3: mod_base = OTHER; note = cytidine-3'-phosphate
  modified_base 4: mod_base = OTHER; note = cytidine-3'-phosphate
  modified_base 5: mod_base = OTHER; note = adenosine-3'-phosphate
  modified_base 6: mod_base = OTHER; note = uridine-3'-phosphate
  modified_base 7: mod_base = OTHER; note = adenosine-3'-phosphate
  modified_base 8: mod_base = OTHER; note = uridine-3'-phosphate
  modified_base 9: mod_base = OTHER; note = adenosine-3'-phosphate
  modified_base 10: mod_base = OTHER; note = uridine-3'-phosphate
  modified_base 11: mod_base = OTHER; note = uridine-3'-phosphate
  modified_base 12: mod_base = OTHER; note = guanosine-3'-phosphate
  modified_base 13: mod_base = OTHER; note = adenosine-3'-phosphate
  modified_base 14: mod_base = OTHER; note = cytidine-3'-phosphate
  modified_base 15: mod_base = OTHER; note = adenosine-3'-phosphate
  modified_base 16: mod_base = OTHER; note = adenosine-3'-phosphate
  modified_base 17: mod_base = OTHER; note = adenosine-3'-phosphate
  modified_base 18: mod_base = OTHER; note = adenosine-3'-phosphate
  modified_base 19: mod_base = OTHER; note = uridine-3'-phosphate
  misc_feature 1..19: note = RNA
  misc_feature 20..21: note = DNA
gcccatatattgacaaaattt

SEQ ID NO: 1895 - DNA, 21 bp, synthetic construct
  source 1..21: mol_type = other DNA
  modified_base 1: mod_base = OTHER; note = cytidine-3'-phosphate
  modified_base 2: mod_base = OTHER; note = cytidine-3'-phosphate
  modified_base 3: mod_base = OTHER; note = cytidine-3'-phosphate
  modified_base 4: mod_base = OTHER; note = adenosine-3'-phosphate
  modified_base 5: mod_base = OTHER; note = uridine-3'-phosphate
  modified_base 6: mod_base = OTHER; note = adenosine-3'-phosphate
  modified_base 7: mod_base = OTHER; note = uridine-3'-phosphate
  modified_base 8: mod_base = OTHER; note = adenosine-3'-phosphate
  modified_base 9: mod_base = OTHER; note = uridine-3'-phosphate
  modified_base 10: mod_base = OTHER; note = uridine-3'-phosphate
  modified_base 11: mod_base = OTHER; note = guanosine-3'-phosphate
  modified_base 12: mod_base = OTHER; note = adenosine-3'-phosphate
  modified_base 13: mod_base = OTHER; note = cytidine-3'-phosphate
  modified_base 14: mod_base = OTHER; note = adenosine-3'-phosphate
  modified_base 15: mod_base = OTHER; note = adenosine-3'-phosphate
  modified_base 16: mod_base = OTHER; note = adenosine-3'-phosphate
  modified_base 17: mod_base = OTHER; note = adenosine-3'-phosphate
  modified_base 18: mod_base = OTHER; note = uridine-3'-phosphate
  modified_base 19: mod_base = OTHER; note = adenosine-3'-phosphate
  misc_feature 1..19: note = RNA
  misc_feature 20..21: note = DNA
cccatatattgacaaaatatt

SEQ ID NO: 1896 - DNA, 21 bp, synthetic construct
  source 1..21: mol_type = other DNA
  modified_base 1: mod_base = OTHER; note = cytidine-3'-phosphate
  modified_base 2: mod_base = OTHER; note = cytidine-3'-phosphate
  modified_base 3: mod_base = OTHER; note = adenosine-3'-phosphate
  modified_base 4: mod_base = OTHER; note = uridine-3'-phosphate
  modified_base 5: mod_base = OTHER; note = adenosine-3'-phosphate
  modified_base 6: mod_base = OTHER; note = uridine-3'-phosphate
  modified_base 7: mod_base = OTHER; note = adenosine-3'-phosphate
  modified_base 8: mod_base = OTHER; note = uridine-3'-phosphate
  modified_base 9: mod_base = OTHER; note = uridine-3'-phosphate
  modified_base 10: mod_base = OTHER; note = guanosine-3'-phosphate
  modified_base 11: mod_base = OTHER; note = adenosine-3'-phosphate
  modified_base 12: mod_base = OTHER; note = cytidine-3'-phosphate
  modified_base 13: mod_base = OTHER; note = adenosine-3'-phosphate
  modified_base 14: mod_base = OTHER; note = adenosine-3'-phosphate
  modified_base 15: mod_base = OTHER; note = adenosine-3'-phosphate
  modified_base 16: mod_base = OTHER; note = adenosine-3'-phosphate
  modified_base 17: mod_base = OTHER; note = uridine-3'-phosphate
  modified_base 18: mod_base = OTHER; note = adenosine-3'-phosphate
  modified_base 19: mod_base = OTHER; note = adenosine-3'-phosphate
  misc_feature 1..19: note = RNA
  misc_feature 20..21: note = DNA
ccatatattgacaaaataatt

SEQ ID NO: 1897 - DNA, 21 bp, synthetic construct
  source 1..21: mol_type = other DNA
  modified_base 1: mod_base = OTHER; note = cytidine-3'-phosphate
  modified_base 2: mod_base = OTHER; note = adenosine-3'-phosphate
  modified_base 3: mod_base = OTHER; note = uridine-3'-phosphate
  modified_base 4: mod_base = OTHER; note = adenosine-3'-phosphate
  modified_base 5: mod_base = OTHER; note = uridine-3'-phosphate
  modified_base 6: mod_base = OTHER; note = adenosine-3'-phosphate
  modified_base 7: mod_base = OTHER; note = uridine-3'-phosphate
  modified_base 8: mod_base = OTHER; note = uridine-3'-phosphate
  modified_base 9: mod_base = OTHER; note = guanosine-3'-phosphate
  modified_base 10: mod_base = OTHER; note = adenosine-3'-phosphate
  modified_base 11: mod_base = OTHER; note = cytidine-3'-phosphate
  modified_base 12: mod_base = OTHER; note = adenosine-3'-phosphate
  modified_base 13: mod_base = OTHER; note = adenosine-3'-phosphate
  modified_base 14: mod_base = OTHER; note = adenosine-3'-phosphate
  modified_base 15: mod_base = OTHER; note = adenosine-3'-phosphate
  modified_base 16: mod_base = OTHER; note = uridine-3'-phosphate
  modified_base 17: mod_base = OTHER; note = adenosine-3'-phosphate
  modified_base 18: mod_base = OTHER; note = adenosine-3'-phosphate
  modified_base 19: mod_base = OTHER; note = cytidine-3'-phosphate
  misc_feature 1..19: note = RNA
  misc_feature 20..21: note = DNA
catatattgacaaaataactt

SEQ ID NO: 1898 - DNA, 21 bp, synthetic construct
  source 1..21: mol_type = other DNA
  modified_base 1: mod_base = OTHER; note = adenosine-3'-phosphate
  modified_base 2: mod_base = OTHER; note = uridine-3'-phosphate
  modified_base 3: mod_base = OTHER; note = adenosine-3'-phosphate
  modified_base 4: mod_base = OTHER; note = uridine-3'-phosphate
  modified_base 5: mod_base = OTHER; note = adenosine-3'-phosphate
  modified_base 6: mod_base = OTHER; note = uridine-3'-phosphate
  modified_base 7: mod_base = OTHER; note = uridine-3'-phosphate
  modified_base 8: mod_base = OTHER; note = guanosine-3'-phosphate
  modified_base 9: mod_base = OTHER; note = adenosine-3'-phosphate
  modified_base 10: mod_base = OTHER; note = cytidine-3'-phosphate
  modified_base 11: mod_base = OTHER; note = adenosine-3'-phosphate
  modified_base 12: mod_base = OTHER; note = adenosine-3'-phosphate
  modified_base 13: mod_base = OTHER; note = adenosine-3'-phosphate
  modified_base 14: mod_base = OTHER; note = adenosine-3'-phosphate
  modified_base 15: mod_base = OTHER; note = uridine-3'-phosphate
  modified_base 16: mod_base = OTHER; note = adenosine-3'-phosphate
  modified_base 17: mod_base = OTHER; note = adenosine-3'-phosphate
  modified_base 18: mod_base = OTHER; note = cytidine-3'-phosphate
  modified_base 19: mod_base = OTHER; note = uridine-3'-phosphate
  misc_feature 1..19: note = RNA
  misc_feature 20..21: note = DNA
atatattgacaaaataacttt

SEQ ID NO: 1899 - DNA, 21 bp, synthetic construct
  source 1..21: mol_type = other DNA
  modified_base 1: mod_base = OTHER; note = uridine-3'-phosphate
  modified_base 2: mod_base = OTHER; note = adenosine-3'-phosphate
  modified_base 3: mod_base = OTHER; note = uridine-3'-phosphate
  modified_base 4: mod_base = OTHER; note = adenosine-3'-phosphate
  modified_base 5: mod_base = OTHER; note = uridine-3'-phosphate
  modified_base 6: mod_base = OTHER; note = uridine-3'-phosphate
  modified_base 7: mod_base = OTHER; note = guanosine-3'-phosphate
  modified_base 8: mod_base = OTHER; note = adenosine-3'-phosphate
  modified_base 9: mod_base = OTHER; note = cytidine-3'-phosphate
  modified_base 10: mod_base = OTHER; note = adenosine-3'-phosphate
  modified_base 11: mod_base = OTHER; note = adenosine-3'-phosphate
  modified_base 12: mod_base = OTHER; note = adenosine-3'-phosphate
  modified_base 13: mod_base = OTHER; note = adenosine-3'-phosphate
  modified_base 14: mod_base = OTHER; note = uridine-3'-phosphate
  modified_base 15: mod_base = OTHER; note = adenosine-3'-phosphate
  modified_base 16: mod_base = OTHER; note = adenosine-3'-phosphate
  modified_base 17: mod_base = OTHER; note = cytidine-3'-phosphate
  modified_base 18: mod_base = OTHER; note = uridine-3'-phosphate
  modified_base 19: mod_base = OTHER; note = cytidine-3'-phosphate
  misc_feature 1..19: note = RNA
  misc_feature 20..21: note = DNA
tatattgacaaaataactctt

SEQ ID NO: 1900 - DNA, 21 bp, synthetic construct
  source 1..21: mol_type = other DNA
  modified_base 1: mod_base = OTHER; note = adenosine-3'-phosphate
  modified_base 2: mod_base = OTHER; note = uridine-3'-phosphate
  modified_base 3: mod_base = OTHER; note = adenosine-3'-phosphate
  modified_base 4: mod_base = OTHER; note = uridine-3'-phosphate
  modified_base 5: mod_base = OTHER; note = uridine-3'-phosphate
  modified_base 6: mod_base = OTHER; note = guanosine-3'-phosphate
  modified_base 7: mod_base = OTHER; note = adenosine-3'-phosphate
  modified_base 8: mod_base = OTHER; note = cytidine-3'-phosphate
  modified_base 9: mod_base = OTHER; note = adenosine-3'-phosphate
  modified_base 10: mod_base = OTHER; note = adenosine-3'-phosphate
  modified_base 11: mod_base = OTHER; note = adenosine-3'-phosphate
  modified_base 12: mod_base = OTHER; note = adenosine-3'-phosphate
  modified_base 13: mod_base = OTHER; note = uridine-3'-phosphate
  modified_base 14: mod_base = OTHER; note = adenosine-3'-phosphate
  modified_base 15: mod_base = OTHER; note = adenosine-3'-phosphate
  modified_base 16: mod_base = OTHER; note = cytidine-3'-phosphate
  modified_base 17: mod_base = OTHER; note = uridine-3'-phosphate
  modified_base 18: mod_base = OTHER; note = cytidine-3'-phosphate
  modified_base 19: mod_base = OTHER; note = adenosine-3'-phosphate
  misc_feature 1..19: note = RNA
  misc_feature 20..21: note = DNA
atattgacaaaataactcatt

SEQ ID NO: 1901 - DNA, 21 bp, synthetic construct
  source 1..21: mol_type = other DNA
  modified_base 1: mod_base = OTHER; note = uridine-3'-phosphate
  modified_base 2: mod_base = OTHER; note = adenosine-3'-phosphate
  modified_base 3: mod_base = OTHER; note = uridine-3'-phosphate
  modified_base 4: mod_base = OTHER; note = uridine-3'-phosphate
  modified_base 5: mod_base = OTHER; note = guanosine-3'-phosphate
  modified_base 6: mod_base = OTHER; note = adenosine-3'-phosphate
  modified_base 7: mod_base = OTHER; note = cytidine-3'-phosphate
  modified_base 8: mod_base = OTHER; note = adenosine-3'-phosphate
  modified_base 9: mod_base = OTHER; note = adenosine-3'-phosphate
  modified_base 10: mod_base = OTHER; note = adenosine-3'-phosphate
  modified_base 11: mod_base = OTHER; note = adenosine-3'-phosphate
  modified_base 12: mod_base = OTHER; note = uridine-3'-phosphate
  modified_base 13: mod_base = OTHER; note = adenosine-3'-phosphate
  modified_base 14: mod_base = OTHER; note = adenosine-3'-phosphate
  modified_base 15: mod_base = OTHER; note = cytidine-3'-phosphate
  modified_base 16: mod_base = OTHER; note = uridine-3'-phosphate
  modified_base 17: mod_base = OTHER; note = cytidine-3'-phosphate
  modified_base 18: mod_base = OTHER; note = adenosine-3'-phosphate
  modified_base 19: mod_base = OTHER; note = cytidine-3'-phosphate
  misc_feature 1..19: note = RNA
  misc_feature 20..21: note = DNA
tattgacaaaataactcactt

SEQ ID NO: 1902 - DNA, 21 bp, synthetic construct
  source 1..21: mol_type = other DNA
  modified_base 1: mod_base = OTHER; note = adenosine-3'-phosphate
  modified_base 2: mod_base = OTHER; note = uridine-3'-phosphate
  modified_base 3: mod_base = OTHER; note = uridine-3'-phosphate
  modified_base 4: mod_base = OTHER; note = guanosine-3'-phosphate
  modified_base 5: mod_base = OTHER; note = adenosine-3'-phosphate
  modified_base 6: mod_base = OTHER; note = cytidine-3'-phosphate
  modified_base 7: mod_base = OTHER; note = adenosine-3'-phosphate
  modified_base 8: mod_base = OTHER; note = adenosine-3'-phosphate
  modified_base 9: mod_base = OTHER; note = adenosine-3'-phosphate
  modified_base 10: mod_base = OTHER; note = adenosine-3'-phosphate
  modified_base 11: mod_base = OTHER; note = uridine-3'-phosphate
  modified_base 12: mod_base = OTHER; note = adenosine-3'-phosphate
  modified_base 13: mod_base = OTHER; note = adenosine-3'-phosphate
  modified_base 14: mod_base = OTHER; note = cytidine-3'-phosphate
  modified_base 15: mod_base = OTHER; note = uridine-3'-phosphate
  modified_base 16: mod_base = OTHER; note = cytidine-3'-phosphate
  modified_base 17: mod_base = OTHER; note = adenosine-3'-phosphate
  modified_base 18: mod_base = OTHER; note = cytidine-3'-phosphate
  modified_base 19: mod_base = OTHER; note = uridine-3'-phosphate
  misc_feature 1..19: note = RNA
  misc_feature 20..21: note = DNA
attgacaaaataactcacttt

SEQ ID NO: 1903 - DNA, 21 bp, synthetic construct
  source 1..21: mol_type = other DNA
  modified_base 1: mod_base = OTHER; note = uridine-3'-phosphate
  modified_base 2: mod_base = OTHER; note = uridine-3'-phosphate
  modified_base 3: mod_base = OTHER; note = guanosine-3'-phosphate
  modified_base 4: mod_base = OTHER; note = adenosine-3'-phosphate
  modified_base 5: mod_base = OTHER; note = cytidine-3'-phosphate
  modified_base 6: mod_base = OTHER; note = adenosine-3'-phosphate
  modified_base 7: mod_base = OTHER; note = adenosine-3'-phosphate
  modified_base 8: mod_base = OTHER; note = adenosine-3'-phosphate
  modified_base 9: mod_base = OTHER; note = adenosine-3'-phosphate
  modified_base 10: mod_base = OTHER; note = uridine-3'-phosphate
  modified_base 11: mod_base = OTHER; note = adenosine-3'-phosphate
  modified_base 12: mod_base = OTHER; note = adenosine-3'-phosphate
  modified_base 13: mod_base = OTHER; note = cytidine-3'-phosphate
  modified_base 14: mod_base = OTHER; note = uridine-3'-phosphate
  modified_base 15: mod_base = OTHER; note = cytidine-3'-phosphate
  modified_base 16: mod_base = OTHER; note = adenosine-3'-phosphate
  modified_base 17: mod_base = OTHER; note = cytidine-3'-phosphate
  modified_base 18: mod_base = OTHER; note = uridine-3'-phosphate
  modified_base 19: mod_base = OTHER; note = adenosine-3'-phosphate
  misc_feature 1..19: note = RNA
  misc_feature 20..21: note = DNA
ttgacaaaataactcactatt

SEQ ID NO: 1904 - DNA, 21 bp, synthetic construct
  source 1..21: mol_type = other DNA
  modified_base 1: mod_base = OTHER; note = uridine-3'-phosphate
  modified_base 2: mod_base = OTHER; note = guanosine-3'-phosphate
  modified_base 3: mod_base = OTHER; note = adenosine-3'-phosphate
  modified_base 4: mod_base = OTHER; note = cytidine-3'-phosphate
  modified_base 5: mod_base = OTHER; note = adenosine-3'-phosphate
  modified_base 6: mod_base = OTHER; note = adenosine-3'-phosphate
  modified_base 7: mod_base = OTHER; note = adenosine-3'-phosphate
  modified_base 8: mod_base = OTHER; note = adenosine-3'-phosphate
  modified_base 9: mod_base = OTHER; note = uridine-3'-phosphate
  modified_base 10: mod_base = OTHER; note = adenosine-3'-phosphate
  modified_base 11: mod_base = OTHER; note = adenosine-3'-phosphate
  modified_base 12: mod_base = OTHER; note = cytidine-3'-phosphate
  modified_base 13: mod_base = OTHER; note = uridine-3'-phosphate
  modified_base 14: mod_base = OTHER; note = cytidine-3'-phosphate
  modified_base 15: mod_base = OTHER; note = adenosine-3'-phosphate
  modified_base 16: mod_base = OTHER; note = cytidine-3'-phosphate
  modified_base 17: mod_base = OTHER; note = uridine-3'-phosphate
  modified_base 18: mod_base = OTHER; note = adenosine-3'-phosphate
  modified_base 19: mod_base = OTHER; note = uridine-3'-phosphate
  misc_feature 1..19: note = RNA
  misc_feature 20..21: note = DNA
tgacaaaataactcactattt

SEQ ID NO: 1905 - DNA, 21 bp, synthetic construct
  source 1..21: mol_type = other DNA
  modified_base 1: mod_base = OTHER; note = guanosine-3'-phosphate
  modified_base 2: mod_base = OTHER; note = adenosine-3'-phosphate
  modified_base 3: mod_base = OTHER; note = cytidine-3'-phosphate
  modified_base 4: mod_base = OTHER; note = adenosine-3'-phosphate
  modified_base 5: mod_base = OTHER; note = adenosine-3'-phosphate
  modified_base 6: mod_base = OTHER; note = adenosine-3'-phosphate
  modified_base 7: mod_base = OTHER; note = adenosine-3'-phosphate
  modified_base 8: mod_base = OTHER; note = uridine-3'-phosphate
  modified_base 9: mod_base = OTHER; note = adenosine-3'-phosphate
  modified_base 10: mod_base = OTHER; note = adenosine-3'-phosphate
  modified_base 11: mod_base = OTHER; note = cytidine-3'-phosphate
  modified_base 12: mod_base = OTHER; note = uridine-3'-phosphate
  modified_base 13: mod_base = OTHER; note = cytidine-3'-phosphate
  modified_base 14: mod_base = OTHER; note = adenosine-3'-phosphate
  modified_base 15: mod_base = OTHER; note = cytidine-3'-phosphate
  modified_base 16: mod_base = OTHER; note = uridine-3'-phosphate
  modified_base 17: mod_base = OTHER; note = adenosine-3'-phosphate
  modified_base 18: mod_base = OTHER; note = uridine-3'-phosphate
  modified_base 19: mod_base = OTHER; note = adenosine-3'-phosphate
  misc_feature 1..19: note = RNA
  misc_feature 20..21: note = DNA
gacaaaataactcactatatt

SEQ ID NO: 1906 - DNA, 21 bp, synthetic construct
  source 1..21: mol_type = other DNA
  modified_base 1: mod_base = OTHER; note = adenosine-3'-phosphate
  modified_base 2: mod_base = OTHER; note = adenosine-3'-phosphate
  modified_base 3: mod_base = OTHER; note = adenosine-3'-phosphate
  modified_base 4: mod_base = OTHER; note = adenosine-3'-phosphate
  modified_base 5: mod_base = OTHER; note = uridine-3'-phosphate
  modified_base 6: mod_base = OTHER; note = adenosine-3'-phosphate
  modified_base 7: mod_base = OTHER; note = adenosine-3'-phosphate
  modified_base 8: mod_base = OTHER; note = cytidine-3'-phosphate
  modified_base 9: mod_base = OTHER; note = uridine-3'-phosphate
  modified_base 10: mod_base = OTHER; note = cytidine-3'-phosphate
  modified_base 11: mod_base = OTHER; note = adenosine-3'-phosphate
  modified_base 12: mod_base = OTHER; note = cytidine-3'-phosphate
  modified_base 13: mod_base = OTHER; note = uridine-3'-phosphate
  modified_base 14: mod_base = OTHER; note = adenosine-3'-phosphate
  modified_base 15: mod_base = OTHER; note = uridine-3'-phosphate
  modified_base 16: mod_base = OTHER; note = adenosine-3'-phosphate
  modified_base 17: mod_base = OTHER; note = adenosine-3'-phosphate
  modified_base 18: mod_base = OTHER; note = uridine-3'-phosphate
  modified_base 19: mod_base = OTHER; note = uridine-3'-phosphate
  misc_feature 1..19: note = RNA
  misc_feature 20..21: note = DNA
aaaataactcactataatttt

SEQ ID NO: 1907 - DNA, 21 bp, synthetic construct
  source 1..21: mol_type = other DNA
  modified_base 1: mod_base = OTHER; note = adenosine-3'-phosphate
  modified_base 2: mod_base = OTHER; note = adenosine-3'-phosphate
  modified_base 3: mod_base = OTHER; note = adenosine-3'-phosphate
  modified_base 4: mod_base = OTHER; note = uridine-3'-phosphate
  modified_base 5: mod_base = OTHER; note = adenosine-3'-phosphate
  modified_base 6: mod_base = OTHER; note = adenosine-3'-phosphate
  modified_base 7: mod_base = OTHER; note = cytidine-3'-phosphate
  modified_base 8: mod_base = OTHER; note = uridine-3'-phosphate
  modified_base 9: mod_base = OTHER; note = cytidine-3'-phosphate
  modified_base 10: mod_base = OTHER; note = adenosine-3'-phosphate
  modified_base 11: mod_base = OTHER; note = cytidine-3'-phosphate
  modified_base 12: mod_base = OTHER; note = uridine-3'-phosphate
  modified_base 13: mod_base = OTHER; note = adenosine-3'-phosphate
  modified_base 14: mod_base = OTHER; note = uridine-3'-phosphate
  modified_base 15: mod_base = OTHER; note = adenosine-3'-phosphate
  modified_base 16: mod_base = OTHER; note = adenosine-3'-phosphate
  modified_base 17: mod_base = OTHER; note = uridine-3'-phosphate
  modified_base 18: mod_base = OTHER; note = uridine-3'-phosphate
  modified_base 19: mod_base = OTHER; note = adenosine-3'-phosphate
  misc_feature 1..19: note = RNA
  misc_feature 20..21: note = DNA
aaataactcactataattatt

SEQ ID NO: 1908 - DNA, 21 bp, synthetic construct
  source 1..21: mol_type = other DNA
  modified_base 1: mod_base = OTHER; note = adenosine-3'-phosphate
  modified_base 2: mod_base = OTHER; note = adenosine-3'-phosphate
  modified_base 3: mod_base = OTHER; note = uridine-3'-phosphate
  modified_base 4: mod_base = OTHER; note = adenosine-3'-phosphate
  modified_base 5: mod_base = OTHER; note = adenosine-3'-phosphate
  modified_base 6: mod_base = OTHER; note = cytidine-3'-phosphate
  modified_base 7: mod_base = OTHER; note = uridine-3'-phosphate
  modified_base 8: mod_base = OTHER; note = cytidine-3'-phosphate
  modified_base 9: mod_base = OTHER; note = adenosine-3'-phosphate
  modified_base 10: mod_base = OTHER; note = cytidine-3'-phosphate
  modified_base 11: mod_base = OTHER; note = uridine-3'-phosphate
  modified_base 12: mod_base = OTHER; note = adenosine-3'-phosphate
  modified_base 13: mod_base = OTHER; note = uridine-3'-phosphate
  modified_base 14: mod_base = OTHER; note = adenosine-3'-phosphate
  modified_base 15: mod_base = OTHER; note = adenosine-3'-phosphate
  modified_base 16: mod_base = OTHER; note = uridine-3'-phosphate
  modified_base 17: mod_base = OTHER; note = uridine-3'-phosphate
  modified_base 18: mod_base = OTHER; note = adenosine-3'-phosphate
  modified_base 19: mod_base = OTHER; note = cytidine-3'-phosphate
  misc_feature 1..19: note = RNA
  misc_feature 20..21: note = DNA
aataactcactataattactt

SEQ ID NO: 1909 - DNA, 21 bp, synthetic construct
  source 1..21: mol_type = other DNA
  modified_base 1: mod_base = OTHER; note = adenosine-3'-phosphate
  modified_base 2: mod_base = OTHER; note = uridine-3'-phosphate
  modified_base 3: mod_base = OTHER; note = adenosine-3'-phosphate
  modified_base 4: mod_base = OTHER; note = adenosine-3'-phosphate
  modified_base 5: mod_base = OTHER; note = cytidine-3'-phosphate
  modified_base 6: mod_base = OTHER; note = uridine-3'-phosphate
  modified_base 7: mod_base = OTHER; note = cytidine-3'-phosphate
  modified_base 8: mod_base = OTHER; note = adenosine-3'-phosphate
  modified_base 9: mod_base = OTHER; note = cytidine-3'-phosphate
  modified_base 10: mod_base = OTHER; note = uridine-3'-phosphate
  modified_base 11: mod_base = OTHER; note = adenosine-3'-phosphate
  modified_base 12: mod_base = OTHER; note = uridine-3'-phosphate
  modified_base 13: mod_base = OTHER; note = adenosine-3'-phosphate
  modified_base 14: mod_base = OTHER; note = adenosine-3'-phosphate
  modified_base 15: mod_base = OTHER; note = uridine-3'-phosphate
  modified_base 16: mod_base = OTHER; note = uridine-3'-phosphate
  modified_base 17: mod_base = OTHER; note = adenosine-3'-phosphate
  modified_base 18: mod_base = OTHER; note = cytidine-3'-phosphate
  modified_base 19: mod_base = OTHER; note = uridine-3'-phosphate
  misc_feature 1..19: note = RNA
  misc_feature 20..21: note = DNA
ataactcactataattacttt

SEQ ID NO: 1910 - DNA, 21 bp, synthetic construct
  source 1..21: mol_type = other DNA
  modified_base 1: mod_base = OTHER; note = adenosine-3'-phosphate
  modified_base 2: mod_base = OTHER; note = adenosine-3'-phosphate
  modified_base 3: mod_base = OTHER; note = cytidine-3'-phosphate
  modified_base 4: mod_base = OTHER; note = uridine-3'-phosphate
  modified_base 5: mod_base = OTHER; note = cytidine-3'-phosphate
  modified_base 6: mod_base = OTHER; note = adenosine-3'-phosphate
  modified_base 7: mod_base = OTHER; note = cytidine-3'-phosphate
  modified_base 8: mod_base = OTHER; note = uridine-3'-phosphate
  modified_base 9: mod_base = OTHER; note = adenosine-3'-phosphate
  modified_base 10: mod_base = OTHER; note = uridine-3'-phosphate
  modified_base 11: mod_base = OTHER; note = adenosine-3'-phosphate
  modified_base 12: mod_base = OTHER; note = adenosine-3'-phosphate
  modified_base 13: mod_base = OTHER; note = uridine-3'-phosphate
  modified_base 14: mod_base = OTHER; note = uridine-3'-phosphate
  modified_base 15: mod_base = OTHER; note = adenosine-3'-phosphate
  modified_base 16: mod_base = OTHER; note = cytidine-3'-phosphate
  modified_base 17: mod_base = OTHER; note = uridine-3'-phosphate
  modified_base 18: mod_base = OTHER; note = uridine-3'-phosphate
  modified_base 19: mod_base = OTHER; note = guanosine-3'-phosphate
  misc_feature 1..19: note = RNA
  misc_feature 20..21: note = DNA
aactcactataattacttgtt

SEQ ID NO: 1911 - DNA, 21 bp, synthetic construct
  source 1..21: mol_type = other DNA
  modified_base 1: mod_base = OTHER; note = adenosine-3'-phosphate
  modified_base 2: mod_base = OTHER; note = cytidine-3'-phosphate
  modified_base 3: mod_base = OTHER; note = uridine-3'-phosphate
  modified_base 4: mod_base = OTHER; note = cytidine-3'-phosphate
  modified_base 5: mod_base = OTHER; note = adenosine-3'-phosphate
  modified_base 6: mod_base = OTHER; note = cytidine-3'-phosphate
  modified_base 7: mod_base = OTHER; note = uridine-3'-phosphate
  modified_base 8: mod_base = OTHER; note = adenosine-3'-phosphate
  modified_base 9: mod_base = OTHER; note = uridine-3'-phosphate
  modified_base 10: mod_base = OTHER; note = adenosine-3'-phosphate
  modified_base 11: mod_base = OTHER; note = adenosine-3'-phosphate
  modified_base 12: mod_base = OTHER; note = uridine-3'-phosphate
  modified_base 13: mod_base = OTHER; note = uridine-3'-phosphate
  modified_base 14: mod_base = OTHER; note = adenosine-3'-phosphate
  modified_base 15: mod_base = OTHER; note = cytidine-3'-phosphate
  modified_base 16: mod_base = OTHER; note = uridine-3'-phosphate
  modified_base 17: mod_base = OTHER; note = uridine-3'-phosphate
  modified_base 18: mod_base = OTHER; note = guanosine-3'-phosphate
  modified_base 19: mod_base = OTHER; note = adenosine-3'-phosphate
  misc_feature 1..19: note = RNA
  misc_feature 20..21: note = DNA
actcactataattacttgatt

SEQ ID NO: 1912 - DNA, 21 bp, synthetic construct
  source 1..21: mol_type = other DNA
  modified_base 1: mod_base = OTHER; note = cytidine-3'-phosphate
  modified_base 2: mod_base = OTHER; note = uridine-3'-phosphate
  modified_base 3: mod_base = OTHER; note = cytidine-3'-phosphate
  modified_base 4: mod_base = OTHER; note = adenosine-3'-phosphate
  modified_base 5: mod_base = OTHER; note = cytidine-3'-phosphate
  modified_base 6: mod_base = OTHER; note = uridine-3'-phosphate
  modified_base 7: mod_base = OTHER; note = adenosine-3'-phosphate
  modified_base 8: mod_base = OTHER; note = uridine-3'-phosphate
  modified_base 9: mod_base = OTHER; note = adenosine-3'-phosphate
  modified_base 10: mod_base = OTHER; note = adenosine-3'-phosphate
  modified_base 11: mod_base = OTHER; note = uridine-3'-phosphate
  modified_base 12: mod_base = OTHER; note = uridine-3'-phosphate
  modified_base 13: mod_base = OTHER; note = adenosine-3'-phosphate
  modified_base 14: mod_base = OTHER; note = cytidine-3'-phosphate
  modified_base 15: mod_base = OTHER; note = uridine-3'-phosphate
  modified_base 16: mod_base = OTHER; note = uridine-3'-phosphate
  modified_base 17: mod_base = OTHER; note = guanosine-3'-phosphate
  modified_base 18: mod_base = OTHER; note = adenosine-3'-phosphate
  modified_base 19: mod_base = OTHER; note = uridine-3'-phosphate
  misc_feature 1..19: note = RNA
  misc_feature 20..21: note = DNA
ctcactataattacttgattt

SEQ ID NO: 1913 - DNA, 21 bp, synthetic construct
  source 1..21: mol_type = other DNA
  modified_base 1: mod_base = OTHER; note = uridine-3'-phosphate
  modified_base 2: mod_base = OTHER; note = cytidine-3'-phosphate
  modified_base 3: mod_base = OTHER; note = adenosine-3'-phosphate
  modified_base 4: mod_base = OTHER; note = cytidine-3'-phosphate
  modified_base 5: mod_base = OTHER; note = uridine-3'-phosphate
  modified_base 6: mod_base = OTHER; note = adenosine-3'-phosphate
  modified_base 7: mod_base = OTHER; note = uridine-3'-phosphate
  modified_base 8: mod_base = OTHER; note = adenosine-3'-phosphate
  modified_base 9: mod_base = OTHER; note = adenosine-3'-phosphate
  modified_base 10: mod_base = OTHER; note = uridine-3'-phosphate
  modified_base 11: mod_base = OTHER; note = uridine-3'-phosphate
  modified_base 12: mod_base = OTHER; note = adenosine-3'-phosphate
  modified_base 13: mod_base = OTHER; note = cytidine-3'-phosphate
  modified_base 14: mod_base = OTHER; note = uridine-3'-phosphate
  modified_base 15: mod_base = OTHER; note = uridine-3'-phosphate
  modified_base 16: mod_base = OTHER; note = guanosine-3'-phosphate
  modified_base 17: mod_base = OTHER; note = adenosine-3'-phosphate
  modified_base 18: mod_base = OTHER; note = uridine-3'-phosphate
  modified_base 19: mod_base = OTHER; note = uridine-3'-phosphate
  misc_feature 1..19: note = RNA
  misc_feature 20..21: note = DNA
tcactataattacttgatttt

SEQ ID NO: 1914 - DNA, 21 bp, synthetic construct
  source 1..21: mol_type = other DNA
  modified_base 1: mod_base = OTHER; note = adenosine-3'-phosphate
  modified_base 2: mod_base = OTHER; note = cytidine-3'-phosphate
  modified_base 3: mod_base = OTHER; note = uridine-3'-phosphate
  modified_base 4: mod_base = OTHER; note = adenosine-3'-phosphate
  modified_base 5: mod_base = OTHER; note = uridine-3'-phosphate
  modified_base 6: mod_base = OTHER; note = adenosine-3'-phosphate
  modified_base 7: mod_base = OTHER; note = adenosine-3'-phosphate
  modified_base 8: mod_base = OTHER; note = uridine-3'-phosphate
  modified_base 9: mod_base = OTHER; note = uridine-3'-phosphate
  modified_base 10: mod_base = OTHER; note = adenosine-3'-phosphate
  modified_base 11: mod_base = OTHER; note = cytidine-3'-phosphate
  modified_base 12: mod_base = OTHER; note = uridine-3'-phosphate
  modified_base 13: mod_base = OTHER; note = uridine-3'-phosphate
  modified_base 14: mod_base = OTHER; note = guanosine-3'-phosphate
  modified_base 15: mod_base = OTHER; note = adenosine-3'-phosphate
  modified_base 16: mod_base = OTHER; note = uridine-3'-phosphate
  modified_base 17: mod_base = OTHER; note = uridine-3'-phosphate
  modified_base 18: mod_base = OTHER; note = uridine-3'-phosphate
  modified_base 19: mod_base = OTHER; note = uridine-3'-phosphate
  misc_feature 1..19: note = RNA
  misc_feature 20..21: note = DNA
actataattacttgatttttt

SEQ ID NO: 1915 - DNA, 21 bp, synthetic construct
  source 1..21: mol_type = other DNA
  modified_base 1: mod_base = OTHER; note = cytidine-3'-phosphate
  modified_base 2: mod_base = OTHER; note = uridine-3'-phosphate
  modified_base 3: mod_base = OTHER; note = adenosine-3'-phosphate
  modified_base 4: mod_base = OTHER; note = uridine-3'-phosphate
  modified_base 5: mod_base = OTHER; note = adenosine-3'-phosphate
  modified_base 6: mod_base = OTHER; note = adenosine-3'-phosphate
  modified_base 7: mod_base = OTHER; note = uridine-3'-phosphate
  modified_base 8: mod_base = OTHER; note = uridine-3'-phosphate
  modified_base 9: mod_base = OTHER; note = adenosine-3'-phosphate
  modified_base 10: mod_base = OTHER; note = cytidine-3'-phosphate
  modified_base 11: mod_base = OTHER; note = uridine-3'-phosphate
  modified_base 12: mod_base = OTHER; note = uridine-3'-phosphate
  modified_base 13: mod_base = OTHER; note = guanosine-3'-phosphate
  modified_base 14: mod_base = OTHER; note = adenosine-3'-phosphate
  modified_base 15: mod_base = OTHER; note = uridine-3'-phosphate
  modified_base 16: mod_base = OTHER; note = uridine-3'-phosphate
  modified_base 17: mod_base = OTHER; note = uridine-3'-phosphate
  modified_base 18: mod_base = OTHER; note = uridine-3'-phosphate
  modified_base 19: mod_base = OTHER; note = adenosine-3'-phosphate
  misc_feature 1..19: note = RNA
  misc_feature 20..21: note = DNA
ctataattacttgattttatt

SEQ ID NO: 1916 - DNA, 21 bp, synthetic construct
  source 1..21: mol_type = other DNA
  modified_base 1: mod_base = OTHER; note = uridine-3'-phosphate
  modified_base 2: mod_base = OTHER; note = adenosine-3'-phosphate
  modified_base 3: mod_base = OTHER; note = uridine-3'-phosphate
  modified_base 4: mod_base = OTHER; note = adenosine-3'-phosphate
  modified_base 5: mod_base = OTHER; note = adenosine-3'-phosphate
  modified_base 6: mod_base = OTHER; note = uridine-3'-phosphate
  modified_base 7: mod_base = OTHER; note = uridine-3'-phosphate
  modified_base 8: mod_base = OTHER; note = adenosine-3'-phosphate
  modified_base 9: mod_base = OTHER; note = cytidine-3'-phosphate
  modified_base 10: mod_base = OTHER; note = uridine-3'-phosphate
  modified_base 11: mod_base = OTHER; note = uridine-3'-phosphate
  modified_base 12: mod_base = OTHER; note = guanosine-3'-phosphate
  modified_base 13: mod_base = OTHER; note = adenosine-3'-phosphate
  modified_base 14: mod_base = OTHER; note = uridine-3'-phosphate
  modified_base 15: mod_base = OTHER; note = uridine-3'-phosphate
  modified_base 16: mod_base = OTHER; note = uridine-3'-phosphate
  modified_base 17: mod_base = OTHER; note = uridine-3'-phosphate
  modified_base 18: mod_base = OTHER; note = adenosine-3'-phosphate
  modified_base 19: mod_base = OTHER; note = uridine-3'-phosphate
  misc_feature 1..19: note = RNA
  misc_feature 20..21: note = DNA
tataattacttgattttattt

SEQ ID NO: 1917 - DNA, 21 bp, synthetic construct
  source 1..21: mol_type = other DNA
  modified_base 1: mod_base = OTHER; note = adenosine-3'-phosphate
  modified_base 2: mod_base = OTHER; note = uridine-3'-phosphate
  modified_base 3: mod_base = OTHER; note = adenosine-3'-phosphate
  modified_base 4: mod_base = OTHER; note = adenosine-3'-phosphate
  modified_base 5: mod_base = OTHER; note = uridine-3'-phosphate
  modified_base 6: mod_base = OTHER; note = uridine-3'-phosphate
  modified_base 7: mod_base = OTHER; note = adenosine-3'-phosphate
  modified_base 8: mod_base = OTHER; note = cytidine-3'-phosphate
  modified_base 9: mod_base = OTHER; note = uridine-3'-phosphate
  modified_base 10: mod_base = OTHER; note = uridine-3'-phosphate
  modified_base 11: mod_base = OTHER; note = guanosine-3'-phosphate
  modified_base 12: mod_base = OTHER; note = adenosine-3'-phosphate
  modified_base 13: mod_base = OTHER; note = uridine-3'-phosphate
  modified_base 14: mod_base = OTHER; note = uridine-3'-phosphate
  modified_base 15: mod_base = OTHER; note = uridine-3'-phosphate
  modified_base 16: mod_base = OTHER; note = uridine-3'-phosphate
  modified_base 17: mod_base = OTHER; note = adenosine-3'-phosphate
  modified_base 18: mod_base = OTHER; note = uridine-3'-phosphate
  modified_base 19: mod_base = OTHER; note = cytidine-3'-phosphate
  misc_feature 1..19: note = RNA
  misc_feature 20..21: note = DNA
ataattacttgattttatctt

SEQ ID NO: 1918 - DNA, 21 bp, synthetic construct
  source 1..21: mol_type = other DNA
  modified_base 1: mod_base = OTHER; note = uridine-3'-phosphate
  modified_base 2: mod_base = OTHER; note = adenosine-3'-phosphate
  modified_base 3: mod_base = OTHER; note = adenosine-3'-phosphate
  modified_base 4: mod_base = OTHER; note = uridine-3'-phosphate
  modified_base 5: mod_base = OTHER; note = uridine-3'-phosphate
  modified_base 6: mod_base = OTHER; note = adenosine-3'-phosphate
  modified_base 7: mod_base = OTHER; note = cytidine-3'-phosphate
  modified_base 8: mod_base = OTHER; note = uridine-3'-phosphate
  modified_base 9: mod_base = OTHER; note = uridine-3'-phosphate
  modified_base 10: mod_base = OTHER; note = guanosine-3'-phosphate
  modified_base 11: mod_base = OTHER; note = adenosine-3'-phosphate
  modified_base 12: mod_base = OTHER; note = uridine-3'-phosphate
  modified_base 13: mod_base = OTHER; note = uridine-3'-phosphate
  modified_base 14: mod_base = OTHER; note = uridine-3'-phosphate
  modified_base 15: mod_base = OTHER; note = uridine-3'-phosphate
  modified_base 16: mod_base = OTHER; note = adenosine-3'-phosphate
  modified_base 17: mod_base = OTHER; note = uridine-3'-phosphate
  modified_base 18: mod_base = OTHER; note = cytidine-3'-phosphate
  modified_base 19: mod_base = OTHER; note = cytidine-3'-phosphate
  misc_feature 1..19: note = RNA
  misc_feature 20..21: note = DNA
taattacttgattttatcctt

SEQ ID NO: 1919 - DNA, 21 bp, synthetic construct
  source 1..21: mol_type = other DNA
  modified_base 1: mod_base = OTHER; note = adenosine-3'-phosphate
  modified_base 2: mod_base = OTHER; note = adenosine-3'-phosphate
  modified_base 3: mod_base = OTHER; note = uridine-3'-phosphate
  modified_base 4: mod_base = OTHER; note = uridine-3'-phosphate
  modified_base 5: mod_base = OTHER; note = adenosine-3'-phosphate
  modified_base 6: mod_base = OTHER; note = cytidine-3'-phosphate
  modified_base 7: mod_base = OTHER; note = uridine-3'-phosphate
  modified_base 8: mod_base = OTHER; note = uridine-3'-phosphate
  modified_base 9: mod_base = OTHER; note = guanosine-3'-phosphate
  modified_base 10: mod_base = OTHER; note = adenosine-3'-phosphate
  modified_base 11: mod_base = OTHER; note = uridine-3'-phosphate
  modified_base 12: mod_base = OTHER; note = uridine-3'-phosphate
  modified_base 13: mod_base = OTHER; note = uridine-3'-phosphate
  modified_base 14: mod_base = OTHER; note = uridine-3'-phosphate
  modified_base 15: mod_base = OTHER; note = adenosine-3'-phosphate
  modified_base 16: mod_base = OTHER; note = uridine-3'-phosphate
  modified_base 17: mod_base = OTHER; note = cytidine-3'-phosphate
  modified_base 18: mod_base = OTHER; note = cytidine-3'-phosphate
  modified_base 19: mod_base = OTHER; note = adenosine-3'-phosphate
  misc_feature 1..19: note = RNA
  misc_feature 20..21: note = DNA
aattacttgattttatccatt

SEQ ID NO: 1920 - DNA, 21 bp, synthetic construct
  source 1..21: mol_type = other DNA
  modified_base 1: mod_base = OTHER; note = adenosine-3'-phosphate
  modified_base 2: mod_base = OTHER; note = uridine-3'-phosphate
  modified_base 3: mod_base = OTHER; note = uridine-3'-phosphate
  modified_base 4: mod_base = OTHER; note = adenosine-3'-phosphate
  modified_base 5: mod_base = OTHER; note = cytidine-3'-phosphate
  modified_base 6: mod_base = OTHER; note = uridine-3'-phosphate
  modified_base 7: mod_base = OTHER; note = uridine-3'-phosphate
  modified_base 8: mod_base = OTHER; note = guanosine-3'-phosphate
  modified_base 9: mod_base = OTHER; note = adenosine-3'-phosphate
  modified_base 10: mod_base = OTHER; note = uridine-3'-phosphate
  modified_base 11: mod_base = OTHER; note = uridine-3'-phosphate
  modified_base 12: mod_base = OTHER; note = uridine-3'-phosphate
  modified_base 13: mod_base = OTHER; note = uridine-3'-phosphate
  modified_base 14: mod_base = OTHER; note = adenosine-3'-phosphate
  modified_base 15: mod_base = OTHER; note = uridine-3'-phosphate
  modified_base 16: mod_base = OTHER; note = cytidine-3'-phosphate
  modified_base 17: mod_base = OTHER; note = cytidine-3'-phosphate
  modified_base 18: mod_base = OTHER; note = adenosine-3'-phosphate
  modified_base 19: mod_base = OTHER; note = adenosine-3'-phosphate
  misc_feature 1..19: note = RNA
  misc_feature 20..21: note = DNA
attacttgattttatccaatt

SEQ ID NO: 1921 - DNA, 21 bp, synthetic construct
  source 1..21: mol_type = other DNA
  modified_base 1: mod_base = OTHER; note = uridine-3'-phosphate
  modified_base 2: mod_base = OTHER; note = uridine-3'-phosphate
  modified_base 3: mod_base = OTHER; note = adenosine-3'-phosphate
  modified_base 4: mod_base = OTHER; note = uridine-3'-phosphate
  modified_base 5: mod_base = OTHER; note = cytidine-3'-phosphate
  modified_base 6: mod_base = OTHER; note = cytidine-3'-phosphate
  modified_base 7: mod_base = OTHER; note = adenosine-3'-phosphate
  modified_base 8: mod_base = OTHER; note = adenosine-3'-phosphate
  modified_base 9: mod_base = OTHER; note = guanosine-3'-phosphate
  modified_base 10: mod_base = OTHER; note = guanosine-3'-phosphate
  modified_base 11: mod_base = OTHER; note = guanosine-3'-phosphate
  modified_base 12: mod_base = OTHER; note = cytidine-3'-phosphate
  modified_base 13: mod_base = OTHER; note = adenosine-3'-phosphate
  modified_base 14: mod_base = OTHER; note = adenosine-3'-phosphate
  modified_base 15: mod_base = OTHER; note = adenosine-3'-phosphate
  modified_base 16: mod_base = OTHER; note = adenosine-3'-phosphate
  modified_base 17: mod_base = OTHER; note = uridine-3'-phosphate
  modified_base 18: mod_base = OTHER; note = uridine-3'-phosphate
  modified_base 19: mod_base = OTHER; note = adenosine-3'-phosphate
  misc_feature 1..19: note = RNA
  misc_feature 20..21: note = DNA
ttatccaagggcaaaattatt

SEQ ID NO: 1922 - DNA, 21 bp, synthetic construct
  source 1..21: mol_type = other DNA
  modified_base 1: mod_base = OTHER; note = guanosine-3'-phosphate
  modified_base 2: mod_base = OTHER; note = cytidine-3'-phosphate
  modified_base 3: mod_base = OTHER; note = adenosine-3'-phosphate
  modified_base 4: mod_base = OTHER; note = adenosine-3'-phosphate
  modified_base 5: mod_base = OTHER; note = adenosine-3'-phosphate
  modified_base 6: mod_base = OTHER; note = adenosine-3'-phosphate
  modified_base 7: mod_base = OTHER; note = uridine-3'-phosphate
  modified_base 8: mod_base = OTHER; note = uridine-3'-phosphate
  modified_base 9: mod_base = OTHER; note = adenosine-3'-phosphate
  modified_base 10: mod_base = OTHER; note = uridine-3'-phosphate
  modified_base 11: mod_base = OTHER; note = cytidine-3'-phosphate
  modified_base 12: mod_base = OTHER; note = cytidine-3'-phosphate
  modified_base 13: mod_base = OTHER; note = adenosine-3'-phosphate
  modified_base 14: mod_base = OTHER; note = cytidine-3'-phosphate
  modified_base 15: mod_base = OTHER; note = uridine-3'-phosphate
  modified_base 16: mod_base = OTHER; note = uridine-3'-phosphate
  modified_base 17: mod_base = OTHER; note = uridine-3'-phosphate
  modified_base 18: mod_base = OTHER; note = guanosine-3'-phosphate
  modified_base 19: mod_base = OTHER; note = guanosine-3'-phosphate
  misc_feature 1..19: note = RNA
  misc_feature 20..21: note = DNA
gcaaaattatccactttggtt

SEQ ID NO: 1923 - DNA, 21 bp, synthetic construct
  source 1..21: mol_type = other DNA
  modified_base 1: mod_base = OTHER; note = cytidine-3'-phosphate
  modified_base 2: mod_base = OTHER; note = adenosine-3'-phosphate
  modified_base 3: mod_base = OTHER; note = cytidine-3'-phosphate
  modified_base 4: mod_base = OTHER; note = uridine-3'-phosphate
  modified_base 5: mod_base = OTHER; note = uridine-3'-phosphate
  modified_base 6: mod_base = OTHER; note = uridine-3'-phosphate
  modified_base 7: mod_base = OTHER; note = guanosine-3'-phosphate
  modified_base 8: mod_base = OTHER; note = guanosine-3'-phosphate
  modified_base 9: mod_base = OTHER; note = cytidine-3'-phosphate
  modified_base 10: mod_base = OTHER; note = adenosine-3'-phosphate
  modified_base 11: mod_base = OTHER; note = cytidine-3'-phosphate
  modified_base 12: mod_base = OTHER; note = guanosine-3'-phosphate
  modified_base 13: mod_base = OTHER; note = adenosine-3'-phosphate
  modified_base 14: mod_base = OTHER; note = guanosine-3'-phosphate
  modified_base 15: mod_base = OTHER; note = guanosine-3'-phosphate
  modified_base 16: mod_base = OTHER; note = guanosine-3'-phosphate
  modified_base 17: mod_base = OTHER; note = adenosine-3'-phosphate
  modified_base 18: mod_base = OTHER; note = guanosine-3'-phosphate
  modified_base 19: mod_base = OTHER; note = adenosine-3'-phosphate
  misc_feature 1..19: note = RNA
  misc_feature 20..21: note = DNA
cactttggcacgagggagatt

SEQ ID NO: 1924 - DNA, 21 bp, synthetic construct
  source 1..21: mol_type = other DNA
  modified_base 1: mod_base = OTHER; note = cytidine-3'-phosphate
  modified_base 2: mod_base = OTHER; note = guanosine-3'-phosphate
  modified_base 3: mod_base = OTHER; note = adenosine-3'-phosphate
  modified_base 4: mod_base = OTHER; note = guanosine-3'-phosphate
  modified_base 5: mod_base = OTHER; note = guanosine-3'-phosphate
  modified_base 6: mod_base = OTHER; note = guanosine-3'-phosphate
  modified_base 7: mod_base = OTHER; note = adenosine-3'-phosphate
  modified_base 8: mod_base = OTHER; note = guanosine-3'-phosphate
  modified_base 9: mod_base = OTHER; note = adenosine-3'-phosphate
  modified_base 10: mod_base = OTHER; note = adenosine-3'-phosphate
  modified_base 11: mod_base = OTHER; note = adenosine-3'-phosphate
  modified_base 12: mod_base = OTHER; note = uridine-3'-phosphate
  modified_base 13: mod_base = OTHER; note = uridine-3'-phosphate
  modified_base 14: mod_base = OTHER; note = uridine-3'-phosphate
  modified_base 15: mod_base = OTHER; note = uridine-3'-phosphate
  modified_base 16: mod_base = OTHER; note = cytidine-3'-phosphate
  modified_base 17: mod_base = OTHER; note = adenosine-3'-phosphate
  modified_base 18: mod_base = OTHER; note = guanosine-3'-phosphate
  modified_base 19: mod_base = OTHER; note = adenosine-3'-phosphate
  misc_feature 1..19: note = RNA
  misc_feature 20..21: note = DNA
cgagggagaaattttcagatt

SEQ ID NO: 1925 - DNA, 21 bp, synthetic construct
  source 1..21: mol_type = other DNA
  modified_base 1: mod_base = OTHER; note = adenosine-3'-phosphate
  modified_base 2: mod_base = OTHER; note = uridine-3'-phosphate
  modified_base 3: mod_base = OTHER; note = uridine-3'-phosphate
  modified_base 4: mod_base = OTHER; note = uridine-3'-phosphate
  modified_base 5: mod_base = OTHER; note = uridine-3'-phosphate
  modified_base 6: mod_base = OTHER; note = cytidine-3'-phosphate
  modified_base 7: mod_base = OTHER; note = adenosine-3'-phosphate
  modified_base 8: mod_base = OTHER; note = guanosine-3'-phosphate
  modified_base 9: mod_base = OTHER; note = adenosine-3'-phosphate
  modified_base 10: mod_base = OTHER; note = uridine-3'-phosphate
  modified_base 11: mod_base = OTHER; note = guanosine-3'-phosphate
  modified_base 12: mod_base = OTHER; note = cytidine-3'-phosphate
  modified_base 13: mod_base = OTHER; note = adenosine-3'-phosphate
  modified_base 14: mod_base = OTHER; note = uridine-3'-phosphate
  modified_base 15: mod_base = OTHER; note = cytidine-3'-phosphate
  modified_base 16: mod_base = OTHER; note = uridine-3'-phosphate
  modified_base 17: mod_base = OTHER; note = uridine-3'-phosphate
  modified_base 18: mod_base = OTHER; note = adenosine-3'-phosphate
  modified_base 19: mod_base = OTHER; note = uridine-3'-phosphate
  misc_feature 1..19: note = RNA
  misc_feature 20..21: note = DNA
attttcagatgcatcttattt

SEQ ID NO: 1926 - DNA, 21 bp, synthetic construct
  source 1..21: mol_type = other DNA
  modified_base 1: mod_base = OTHER; note = guanosine-3'-phosphate
  modified_base 2: mod_base = OTHER; note = cytidine-3'-phosphate
  modified_base 3: mod_base = OTHER; note = adenosine-3'-phosphate
  modified_base 4: mod_base = OTHER; note = uridine-3'-phosphate
  modified_base 5: mod_base = OTHER; note = cytidine-3'-phosphate
  modified_base 6: mod_base = OTHER; note = uridine-3'-phosphate
  modified_base 7: mod_base = OTHER; note = uridine-3'-phosphate
  modified_base 8: mod_base = OTHER; note = adenosine-3'-phosphate
  modified_base 9: mod_base = OTHER; note = uridine-3'-phosphate
  modified_base 10: mod_base = OTHER; note = cytidine-3'-phosphate
  modified_base 11: mod_base = OTHER; note = adenosine-3'-phosphate
  modified_base 12: mod_base = OTHER; note = adenosine-3'-phosphate
  modified_base 13: mod_base = OTHER; note = adenosine-3'-phosphate
  modified_base 14: mod_base = OTHER; note = guanosine-3'-phosphate
  modified_base 15: mod_base = OTHER; note = uridine-3'-phosphate
  modified_base 16: mod_base = OTHER; note = adenosine-3'-phosphate
  modified_base 17: mod_base = OTHER; note = uridine-3'-phosphate
  modified_base 18: mod_base = OTHER; note = adenosine-3'-phosphate
  modified_base 19: mod_base = OTHER; note = adenosine-3'-phosphate
  misc_feature 1..19: note = RNA
  misc_feature 20..21: note = DNA
gcatcttatcaaagtataatt

SEQ ID NO: 1927 - DNA, 21 bp, synthetic construct
  source 1..21: mol_type = other DNA
  modified_base 1: mod_base = OTHER; note = cytidine-3'-phosphate
  modified_base 2: mod_base = OTHER; note = adenosine-3'-phosphate
  modified_base 3: mod_base = OTHER; note = adenosine-3'-phosphate
  modified_base 4: mod_base = OTHER; note = adenosine-3'-phosphate
  modified_base 5: mod_base = OTHER; note = guanosine-3'-phosphate
  modified_base 6: mod_base = OTHER; note = uridine-3'-phosphate
  modified_base 7: mod_base = OTHER; note = adenosine-3'-phosphate
  modified_base 8: mod_base = OTHER; note = uridine-3'-phosphate
  modified_base 9: mod_base = OTHER; note = adenosine-3'-phosphate
  modified_base 10: mod_base = OTHER; note = adenosine-3'-phosphate
  modified_base 11: mod_base = OTHER; note = adenosine-3'-phosphate
  modified_base 12: mod_base = OTHER; note = cytidine-3'-phosphate
  modified_base 13: mod_base = OTHER; note = adenosine-3'-phosphate
  modified_base 14: mod_base = OTHER; note = uridine-3'-phosphate
  modified_base 15: mod_base = OTHER; note = uridine-3'-phosphate
  modified_base 16: mod_base = OTHER; note = cytidine-3'-phosphate
  modified_base 17: mod_base = OTHER; note = cytidine-3'-phosphate
  modified_base 18: mod_base = OTHER; note = adenosine-3'-phosphate
  modified_base 19: mod_base = OTHER; note = guanosine-3'-phosphate
  misc_feature 1..19: note = RNA
  misc_feature 20..21: note = DNA
caaagtataaacattccagtt

SEQ ID NO: 1928 - DNA, 21 bp, synthetic construct
  source 1..21: mol_type = other DNA
  modified_base 1: mod_base = OTHER; note = adenosine-3'-phosphate
  modified_base 2: mod_base = OTHER; note = uridine-3'-phosphate
  modified_base 3: mod_base = OTHER; note = uridine-3'-phosphate
  modified_base 4: mod_base = OTHER; note = cytidine-3'-phosphate
  modified_base 5: mod_base = OTHER; note = cytidine-3'-phosphate
  modified_base 6: mod_base = OTHER; note = adenosine-3'-phosphate
  modified_base 7: mod_base = OTHER; note = guanosine-3'-phosphate
  modified_base 8: mod_base = OTHER; note = uridine-3'-phosphate
  modified_base 9: mod_base = OTHER; note = adenosine-3'-phosphate
  modified_base 10: mod_base = OTHER; note = adenosine-3'-phosphate
  modified_base 11: mod_base = OTHER; note = cytidine-3'-phosphate
  modified_base 12: mod_base = OTHER; note = adenosine-3'-phosphate
  modified_base 13: mod_base = OTHER; note = cytidine-3'-phosphate
  modified_base 14: mod_base = OTHER; note = adenosine-3'-phosphate
  modified_base 15: mod_base = OTHER; note = guanosine-3'-phosphate
  modified_base 16: mod_base = OTHER; note = adenosine-3'-phosphate
  modified_base 17: mod_base = OTHER; note = adenosine-3'-phosphate
  modified_base 18: mod_base = OTHER; note = cytidine-3'-phosphate
  modified_base 19: mod_base = OTHER; note = adenosine-3'-phosphate
  misc_feature 1..19: note = RNA
  misc_feature 20..21: note = DNA
attccagtaacacagaacatt

SEQ ID NO: 1929 - DNA, 21 bp, synthetic construct
  source 1..21: mol_type = other DNA
  modified_base 1: mod_base = OTHER; note = cytidine-3'-phosphate
  modified_base 2: mod_base = OTHER; note = adenosine-3'-phosphate
  modified_base 3: mod_base = OTHER; note = cytidine-3'-phosphate
  modified_base 4: mod_base = OTHER; note = adenosine-3'-phosphate
  modified_base 5: mod_base = OTHER; note = guanosine-3'-phosphate
  modified_base 6: mod_base = OTHER; note = adenosine-3'-phosphate
  modified_base 7: mod_base = OTHER; note = adenosine-3'-phosphate
  modified_base 8: mod_base = OTHER; note = cytidine-3'-phosphate
  modified_base 9: mod_base = OTHER; note = adenosine-3'-phosphate
  modified_base 10: mod_base = OTHER; note = uridine-3'-phosphate
  modified_base 11: mod_base = OTHER; note = guanosine-3'-phosphate
  modified_base 12: mod_base = OTHER; note = guanosine-3'-phosphate
  modified_base 13: mod_base = OTHER; note = uridine-3'-phosphate
  modified_base 14: mod_base = OTHER; note = uridine-3'-phosphate
  modified_base 15: mod_base = OTHER; note = cytidine-3'-phosphate
  modified_base 16: mod_base = OTHER; note = cytidine-3'-phosphate
  modified_base 17: mod_base = OTHER; note = uridine-3'-phosphate
  modified_base 18: mod_base = OTHER; note = uridine-3'-phosphate
  modified_base 19: mod_base = OTHER; note = cytidine-3'-phosphate
  misc_feature 1..19: note = RNA
  misc_feature 20..21: note = DNA
cacagaacatggttccttctt

SEQ ID NO: 1930 - DNA, 21 bp, synthetic construct
  source 1..21: mol_type = other DNA
  modified_base 1: mod_base = OTHER; note = guanosine-3'-phosphate
  modified_base 2: mod_base = OTHER; note = guanosine-3'-phosphate
  modified_base 3: mod_base = OTHER; note = uridine-3'-phosphate
  modified_base 4: mod_base = OTHER; note = uridine-3'-phosphate
  modified_base 5: mod_base = OTHER; note = cytidine-3'-phosphate
  modified_base 6: mod_base = OTHER; note = cytidine-3'-phosphate
  modified_base 7: mod_base = OTHER; note = uridine-3'-phosphate
  modified_base 8: mod_base = OTHER; note = uridine-3'-phosphate
  modified_base 9: mod_base = OTHER; note = cytidine-3'-phosphate
  modified_base 10: mod_base = OTHER; note = adenosine-3'-phosphate
  modified_base 11: mod_base = OTHER; note = uridine-3'-phosphate
  modified_base 12: mod_base = OTHER; note = cytidine-3'-phosphate
  modified_base 13: mod_base = OTHER; note = cytidine-3'-phosphate
  modified_base 14: mod_base = OTHER; note = cytidine-3'-phosphate
  modified_base 15: mod_base = OTHER; note = guanosine-3'-phosphate
  modified_base 16: mod_base = OTHER; note = adenosine-3'-phosphate
  modified_base 17: mod_base = OTHER; note = cytidine-3'-phosphate
  modified_base 18: mod_base = OTHER; note = uridine-3'-phosphate
  modified_base 19: mod_base = OTHER; note = uridine-3'-phosphate
  misc_feature 1..19: note = RNA
  misc_feature 20..21: note = DNA
ggttccttcatcccgactttt

SEQ ID NO: 1931 - DNA, 21 bp, synthetic construct
  source 1..21: mol_type = other DNA
  modified_base 1: mod_base = OTHER; note = cytidine-3'-phosphate
  modified_base 2: mod_base = OTHER; note = cytidine-3'-phosphate
  modified_base 3: mod_base = OTHER; note = cytidine-3'-phosphate
  modified_base 4: mod_base = OTHER; note = guanosine-3'-phosphate
  modified_base 5: mod_base = OTHER; note = adenosine-3'-phosphate
  modified_base 6: mod_base = OTHER; note = cytidine-3'-phosphate
  modified_base 7: mod_base = OTHER; note = uridine-3'-phosphate
  modified_base 8: mod_base = OTHER; note = uridine-3'-phosphate
  modified_base 9: mod_base = OTHER; note = cytidine-3'-phosphate
  modified_base 10: mod_base = OTHER; note = uridine-3'-phosphate
  modified_base 11: mod_base = OTHER; note = guanosine-3'-phosphate
  modified_base 12: mod_base = OTHER; note = guanosine-3'-phosphate
  modified_base 13: mod_base = OTHER; note = uridine-3'-phosphate
  modified_base 14: mod_base = OTHER; note = cytidine-3'-phosphate
  modified_base 15: mod_base = OTHER; note = uridine-3'-phosphate
  modified_base 16: mod_base = OTHER; note = adenosine-3'-phosphate
  modified_base 17: mod_base = OTHER; note = uridine-3'-phosphate
  modified_base 18: mod_base = OTHER; note = uridine-3'-phosphate
  modified_base 19: mod_base = OTHER; note = adenosine-3'-phosphate
  misc_feature 1..19: note = RNA
  misc_feature 20..21: note = DNA
cccgacttctggtctattatt

SEQ ID NO: 1932 - DNA, 21 bp, synthetic construct
  source 1..21: mol_type = other DNA
  modified_base 1: mod_base = OTHER; note = guanosine-3'-phosphate
  modified_base 2: mod_base = OTHER; note = guanosine-3'-phosphate
  modified_base 3: mod_base = OTHER; note = uridine-3'-phosphate
  modified_base 4: mod_base = OTHER; note = cytidine-3'-phosphate
  modified_base 5: mod_base = OTHER; note = uridine-3'-phosphate
  modified_base 6: mod_base = OTHER; note = adenosine-3'-phosphate
  modified_base 7: mod_base = OTHER; note = uridine-3'-phosphate
  modified_base 8: mod_base = OTHER; note = uridine-3'-phosphate
  modified_base 9: mod_base = OTHER; note = adenosine-3'-phosphate
  modified_base 10: mod_base = OTHER; note = cytidine-3'-phosphate
  modified_base 11: mod_base = OTHER; note = adenosine-3'-phosphate
  modified_base 12: mod_base = OTHER; note = uridine-3'-phosphate
  modified_base 13: mod_base = OTHER; note = cytidine-3'-phosphate
  modified_base 14: mod_base = OTHER; note = guanosine-3'-phosphate
  modified_base 15: mod_base = OTHER; note = uridine-3'-phosphate
  modified_base 16: mod_base = OTHER; note = cytidine-3'-phosphate
  modified_base 17: mod_base = OTHER; note = adenosine-3'-phosphate
  modified_base 18: mod_base = OTHER; note = cytidine-3'-phosphate
  modified_base 19: mod_base = OTHER; note = adenosine-3'-phosphate
  misc_feature 1..19: note = RNA
  misc_feature 20..21: note = DNA
ggtctattacatcgtcacatt

SEQ ID NO: 1933 - DNA, 21 bp, synthetic construct
  source 1..21: mol_type = other DNA
  modified_base 1: mod_base = OTHER; note = adenosine-3'-phosphate
  modified_base 2: mod_base = OTHER; note = uridine-3'-phosphate
  modified_base 3: mod_base = OTHER; note = cytidine-3'-phosphate
  modified_base 4: mod_base = OTHER; note = guanosine-3'-phosphate
  modified_base 5: mod_base = OTHER; note = uridine-3'-phosphate
  modified_base 6: mod_base = OTHER; note = cytidine-3'-phosphate
  modified_base 7: mod_base = OTHER; note = adenosine-3'-phosphate
  modified_base 8: mod_base = OTHER; note = cytidine-3'-phosphate
  modified_base 9: mod_base = OTHER; note = adenosine-3'-phosphate
  modified_base 10: mod_base = OTHER; note = guanosine-3'-phosphate
  modified_base 11: mod_base = OTHER; note = guanosine-3'-phosphate
  modified_base 12: mod_base = OTHER; note = adenosine-3'-phosphate
  modified_base 13: mod_base = OTHER; note = guanosine-3'-phosphate
  modified_base 14: mod_base = OTHER; note = adenosine-3'-phosphate
  modified_base 15: mod_base = OTHER; note = adenosine-3'-phosphate
  modified_base 16: mod_base = OTHER; note = cytidine-3'-phosphate
  modified_base 17: mod_base = OTHER; note = adenosine-3'-phosphate
  modified_base 18: mod_base = OTHER; note = guanosine-3'-phosphate
  modified_base 19: mod_base = OTHER; note = adenosine-3'-phosphate
  misc_feature 1..19: note = RNA
  misc_feature 20..21: note = DNA
atcgtcacaggagaacagatt

SEQ ID NO: 1934 - DNA, 21 bp, synthetic construct
  source 1..21: mol_type = other DNA
  modified_base 1: mod_base = OTHER; note = cytidine-3'-phosphate
  modified_base 2: mod_base = OTHER; note = adenosine-3'-phosphate
  modified_base 3: mod_base = OTHER; note = guanosine-3'-phosphate
  modified_base 4: mod_base = OTHER; note = guanosine-3'-phosphate
  modified_base 5: mod_base = OTHER; note = adenosine-3'-phosphate
  modified_base 6: mod_base = OTHER; note = guanosine-3'-phosphate
  modified_base 7: mod_base = OTHER; note = adenosine-3'-phosphate
  modified_base 8: mod_base = OTHER; note = adenosine-3'-phosphate
  modified_base 9: mod_base = OTHER; note = cytidine-3'-phosphate
  modified_base 10: mod_base = OTHER; note = adenosine-3'-phosphate
  modified_base 11: mod_base = OTHER; note = guanosine-3'-phosphate
  modified_base 12: mod_base = OTHER; note = adenosine-3'-phosphate
  modified_base 13: mod_base = OTHER; note = cytidine-3'-phosphate
  modified_base 14: mod_base = OTHER; note = adenosine-3'-phosphate
  modified_base 15: mod_base = OTHER; note = guanosine-3'-phosphate
  modified_base 16: mod_base = OTHER; note = cytidine-3'-phosphate
  modified_base 17: mod_base = OTHER; note = adenosine-3'-phosphate
  modified_base 18: mod_base = OTHER; note = guanosine-3'-phosphate
  modified_base 19: mod_base = OTHER; note = adenosine-3'-phosphate
  misc_feature 1..19: note = RNA
  misc_feature 20..21: note = DNA
caggagaacagacagcagatt

SEQ ID NO: 1935 - DNA, 21 bp, synthetic construct
  source 1..21: mol_type = other DNA
  modified_base 1: mod_base = OTHER; note = cytidine-3'-phosphate
  modified_base 2: mod_base = OTHER; note = adenosine-3'-phosphate
  modified_base 3: mod_base = OTHER; note = guanosine-3'-phosphate
  modified_base 4: mod_base = OTHER; note = cytidine-3'-phosphate
  modified_base 5: mod_base = OTHER; note = adenosine-3'-phosphate
  modified_base 6: mod_base = OTHER; note = guanosine-3'-phosphate
  modified_base 7: mod_base = OTHER; note = adenosine-3'-phosphate
  modified_base 8: mod_base = OTHER; note = adenosine-3'-phosphate
  modified_base 9: mod_base = OTHER; note = uridine-3'-phosphate
  modified_base 10: mod_base = OTHER; note = uridine-3'-phosphate
  modified_base 11: mod_base = OTHER; note = adenosine-3'-phosphate
  modified_base 12: mod_base = OTHER; note = guanosine-3'-phosphate
  modified_base 13: mod_base = OTHER; note = uridine-3'-phosphate
  modified_base 14: mod_base = OTHER; note = guanosine-3'-phosphate
  modified_base 15: mod_base = OTHER; note = uridine-3'-phosphate
  modified_base 16: mod_base = OTHER; note = cytidine-3'-phosphate
  modified_base 17: mod_base = OTHER; note = uridine-3'-phosphate
  modified_base 18: mod_base = OTHER; note = guanosine-3'-phosphate
  modified_base 19: mod_base = OTHER; note = adenosine-3'-phosphate
  misc_feature 1..19: note = RNA
  misc_feature 20..21: note = DNA
cagcagaattagtgtctgatt

SEQ ID NO: 1936 - DNA, 21 bp, synthetic construct
  source 1..21: mol_type = other DNA
  modified_base 1: mod_base = OTHER; note = guanosine-3'-phosphate
  modified_base 2: mod_base = OTHER; note = uridine-3'-phosphate
  modified_base 3: mod_base = OTHER; note = guanosine-3'-phosphate
  modified_base 4: mod_base = OTHER; note = uridine-3'-phosphate
  modified_base 5: mod_base = OTHER; note = cytidine-3'-phosphate
  modified_base 6: mod_base = OTHER; note = uridine-3'-phosphate
  modified_base 7: mod_base = OTHER; note = guanosine-3'-phosphate
  modified_base 8: mod_base = OTHER; note = adenosine-3'-phosphate
  modified_base 9: mod_base = OTHER; note = uridine-3'-phosphate
  modified_base 10: mod_base = OTHER; note = uridine-3'-phosphate
  modified_base 11: mod_base = OTHER; note = cytidine-3'-phosphate
  modified_base 12: mod_base = OTHER; note = adenosine-3'-phosphate
  modified_base 13: mod_base = OTHER; note = guanosine-3'-phosphate
  modified_base 14: mod_base = OTHER; note = uridine-3'-phosphate
  modified_base 15: mod_base = OTHER; note = cytidine-3'-phosphate
  modified_base 16: mod_base = OTHER; note = uridine-3'-phosphate
  modified_base 17: mod_base = OTHER; note = guanosine-3'-phosphate
  modified_base 18: mod_base = OTHER; note = guanosine-3'-phosphate
  modified_base 19: mod_base = OTHER; note = uridine-3'-phosphate
  misc_feature 1..19: note = RNA
  misc_feature 20..21: note = DNA
gtgtctgattcagtctggttt

SEQ ID NO: 1937 - DNA, 21 bp, synthetic construct
  source 1..21: mol_type = other DNA
  modified_base 1: mod_base = OTHER; note = cytidine-3'-phosphate
  modified_base 2: mod_base = OTHER; note = adenosine-3'-phosphate
  modified_base 3: mod_base = OTHER; note = guanosine-3'-phosphate
  modified_base 4: mod_base = OTHER; note = uridine-3'-phosphate
  modified_base 5: mod_base = OTHER; note = cytidine-3'-phosphate
  modified_base 6: mod_base = OTHER; note = uridine-3'-phosphate
  modified_base 7: mod_base = OTHER; note = guanosine-3'-phosphate
  modified_base 8: mod_base = OTHER; note = guanosine-3'-phosphate
  modified_base 9: mod_base = OTHER; note = uridine-3'-phosphate
  modified_base 10: mod_base = OTHER; note = uridine-3'-phosphate
  modified_base 11: mod_base = OTHER; note = adenosine-3'-phosphate
  modified_base 12: mod_base = OTHER; note = adenosine-3'-phosphate
  modified_base 13: mod_base = OTHER; note = adenosine-3'-phosphate
  modified_base 14: mod_base = OTHER; note = uridine-3'-phosphate
  modified_base 15: mod_base = OTHER; note = adenosine-3'-phosphate
  modified_base 16: mod_base = OTHER; note = uridine-3'-phosphate
  modified_base 17: mod_base = OTHER; note = uridine-3'-phosphate
  modified_base 18: mod_base = OTHER; note = guanosine-3'-phosphate
  modified_base 19: mod_base = OTHER; note = adenosine-3'-phosphate
  misc_feature 1..19: note = RNA
  misc_feature 20..21: note = DNA
cagtctggttaaatattgatt

SEQ ID NO: 1938 - DNA, 21 bp, synthetic construct
  source 1..21: mol_type = other DNA
  modified_base 1: mod_base = OTHER; note = guanosine-3'-phosphate
  modified_base 2: mod_base = OTHER; note = uridine-3'-phosphate
  modified_base 3: mod_base = OTHER; note = uridine-3'-phosphate
  modified_base 4: mod_base = OTHER; note = adenosine-3'-phosphate
  modified_base 5: mod_base = OTHER; note = adenosine-3'-phosphate
  modified_base 6: mod_base = OTHER; note = adenosine-3'-phosphate
  modified_base 7: mod_base = OTHER; note = uridine-3'-phosphate
  modified_base 8: mod_base = OTHER; note = adenosine-3'-phosphate
  modified_base 9: mod_base = OTHER; note = uridine-3'-phosphate
  modified_base 10: mod_base = OTHER; note = uridine-3'-phosphate
  modified_base 11: mod_base = OTHER; note = guanosine-3'-phosphate
  modified_base 12: mod_base = OTHER; note = adenosine-3'-phosphate
  modified_base 13: mod_base = OTHER; note = adenosine-3'-phosphate
  modified_base 14: mod_base = OTHER; note = guanosine-3'-phosphate
  modified_base 15: mod_base = OTHER; note = adenosine-3'-phosphate
  modified_base 16: mod_base = OTHER; note = adenosine-3'-phosphate
  modified_base 17: mod_base = OTHER; note = adenosine-3'-phosphate
  modified_base 18: mod_base = OTHER; note = adenosine-3'-phosphate
  modified_base 19: mod_base = OTHER; note = adenosine-3'-phosphate
  misc_feature 1..19: note = RNA
  misc_feature 20..21: note = DNA
gttaaatattgaagaaaaatt

SEQ ID NO: 1939 - DNA, 21 bp, synthetic construct
  source 1..21: mol_type = other DNA
  modified_base 1: mod_base = OTHER; note = adenosine-3'-phosphate
  modified_base 2: mod_base = OTHER; note = guanosine-3'-phosphate
  modified_base 3: mod_base = OTHER; note = adenosine-3'-phosphate
  modified_base 4: mod_base = OTHER; note = adenosine-3'-phosphate
  modified_base 5: mod_base = OTHER; note = adenosine-3'-phosphate
  modified_base 6: mod_base = OTHER; note = adenosine-3'-phosphate
  modified_base 7: mod_base = OTHER; note = adenosine-3'-phosphate
  modified_base 8: mod_base = OTHER; note = uridine-3'-phosphate
  modified_base 9: mod_base = OTHER; note = guanosine-3'-phosphate
  modified_base 10: mod_base = OTHER; note = uridine-3'-phosphate
  modified_base 11: mod_base = OTHER; note = guanosine-3'-phosphate
  modified_base 12: mod_base = OTHER; note = guanosine-3'-phosphate
  modified_base 13: mod_base = OTHER; note = cytidine-3'-phosphate
  modified_base 14: mod_base = OTHER; note = adenosine-3'-phosphate
  modified_base 15: mod_base = OTHER; note = adenosine-3'-phosphate
  modified_base 16: mod_base = OTHER; note = cytidine-3'-phosphate
  modified_base 17: mod_base = OTHER; note = cytidine-3'-phosphate
  modified_base 18: mod_base = OTHER; note = adenosine-3'-phosphate
  modified_base 19: mod_base = OTHER; note = guanosine-3'-phosphate
  misc_feature 1..19: note = RNA
  misc_feature 20..21: note = DNA
agaaaaatgtggcaaccagtt

SEQ ID NO: 1940 - DNA, 21 bp, synthetic construct
  source 1..21: mol_type = other DNA
  modified_base 1: mod_base = OTHER; note = guanosine-3'-phosphate
  modified_base 2: mod_base = OTHER; note = cytidine-3'-phosphate
  modified_base 3: mod_base = OTHER; note = adenosine-3'-phosphate
  modified_base 4: mod_base = OTHER; note = adenosine-3'-phosphate
  modified_base 5: mod_base = OTHER; note = cytidine-3'-phosphate
  modified_base 6: mod_base = OTHER; note = cytidine-3'-phosphate
  modified_base 7: mod_base = OTHER; note = adenosine-3'-phosphate
  modified_base 8: mod_base = OTHER; note = guanosine-3'-phosphate
  modified_base 9: mod_base = OTHER; note = cytidine-3'-phosphate
  modified_base 10: mod_base = OTHER; note = uridine-3'-phosphate
  modified_base 11: mod_base = OTHER; note = cytidine-3'-phosphate
  modified_base 12: mod_base = OTHER; note = cytidine-3'-phosphate
  modified_base 13: mod_base = OTHER; note = adenosine-3'-phosphate
  modified_base 14: mod_base = OTHER; note = guanosine-3'-phosphate
  modified_base 15: mod_base = OTHER; note = guanosine-3'-phosphate
  modified_base 16: mod_base = OTHER; note = uridine-3'-phosphate
  modified_base 17: mod_base = OTHER; note = uridine-3'-phosphate
  modified_base 18: mod_base = OTHER; note = cytidine-3'-phosphate
  modified_base 19: mod_base = OTHER; note = adenosine-3'-phosphate
  misc_feature 1..19: note = RNA
  misc_feature 20..21: note = DNA
gcaaccagctccaggttcatt

SEQ ID NO: 1941 - DNA, 21 bp, synthetic construct
  source 1..21: mol_type = other DNA
  modified_base 1: mod_base = OTHER; note = guanosine-3'-phosphate
  modified_base 2: mod_base = OTHER; note = cytidine-3'-phosphate
  modified_base 3: mod_base = OTHER; note = uridine-3'-phosphate
  modified_base 4: mod_base = OTHER; note = cytidine-3'-phosphate
  modified_base 5: mod_base = OTHER; note = cytidine-3'-phosphate
  modified_base 6: mod_base = OTHER; note = adenosine-3'-phosphate
  modified_base 7: mod_base = OTHER; note = guanosine-3'-phosphate
  modified_base 8: mod_base = OTHER; note = guanosine-3'-phosphate
  modified_base 9: mod_base = OTHER; note = uridine-3'-phosphate
  modified_base 10: mod_base = OTHER; note = uridine-3'-phosphate
  modified_base 11: mod_base = OTHER; note = cytidine-3'-phosphate
  modified_base 12: mod_base = OTHER; note = adenosine-3'-phosphate
  modified_base 13: mod_base = OTHER; note = uridine-3'-phosphate
  modified_base 14: mod_base = OTHER; note = cytidine-3'-phosphate
  modified_base 15: mod_base = OTHER; note = uridine-3'-phosphate
  modified_base 16: mod_base = OTHER; note = guanosine-3'-phosphate
  modified_base 17: mod_base = OTHER; note = uridine-3'-phosphate
  modified_base 18: mod_base = OTHER; note = cytidine-3'-phosphate
  modified_base 19: mod_base = OTHER; note = uridine-3'-phosphate
  misc_feature 1..19: note = RNA
  misc_feature 20..21: note = DNA
gctccaggttcatctgtcttt

SEQ ID NO: 1942 - DNA, 21 bp, synthetic construct
  source 1..21: mol_type = other DNA
  modified_base 1: mod_base = OTHER; note = adenosine-3'-phosphate
  modified_base 2: mod_base = OTHER; note = uridine-3'-phosphate
  modified_base 3: mod_base = OTHER; note = cytidine-3'-phosphate
  modified_base 4: mod_base = OTHER; note = uridine-3'-phosphate
  modified_base 5: mod_base = OTHER; note = guanosine-3'-phosphate
  modified_base 6: mod_base = OTHER; note = uridine-3'-phosphate
  modified_base 7: mod_base = OTHER; note = cytidine-3'-phosphate
  modified_base 8: mod_base = OTHER; note = uridine-3'-phosphate
  modified_base 9: mod_base = OTHER; note = cytidine-3'-phosphate
  modified_base 10: mod_base = OTHER; note = cytidine-3'-phosphate
  modified_base 11: mod_base = OTHER; note = uridine-3'-phosphate
  modified_base 12: mod_base = OTHER; note = guanosine-3'-phosphate
  modified_base 13: mod_base = OTHER; note = adenosine-3'-phosphate
  modified_base 14: mod_base = OTHER; note = uridine-3'-phosphate
  modified_base 15: mod_base = OTHER; note = guanosine-3'-phosphate
  modified_base 16: mod_base = OTHER; note = cytidine-3'-phosphate
  modified_base 17: mod_base = OTHER; note = adenosine-3'-phosphate
  modified_base 18: mod_base = OTHER; note = guanosine-3'-phosphate
  modified_base 19: mod_base = OTHER; note = adenosine-3'-phosphate
  misc_feature 1..19: note = RNA
  misc_feature 20..21: note = DNA
atctgtctcctgatgcagatt

SEQ ID NO: 1943 - DNA, 21 bp, synthetic construct
  source 1..21: mol_type = other DNA
  modified_base 1: mod_base = OTHER; note = guanosine-3'-phosphate
  modified_base 2: mod_base = OTHER; note = adenosine-3'-phosphate
  modified_base 3: mod_base = OTHER; note = uridine-3'-phosphate
  modified_base 4: mod_base = OTHER; note = guanosine-3'-phosphate
  modified_base 5: mod_base = OTHER; note = cytidine-3'-phosphate
  modified_base 6: mod_base = OTHER; note = adenosine-3'-phosphate
  modified_base 7: mod_base = OTHER; note = guanosine-3'-phosphate
  modified_base 8: mod_base = OTHER; note = adenosine-3'-phosphate
  modified_base 9: mod_base = OTHER; note = uridine-3'-phosphate
  modified_base 10: mod_base = OTHER; note = guanosine-3'-phosphate
  modified_base 11: mod_base = OTHER; note = cytidine-3'-phosphate
  modified_base 12: mod_base = OTHER; note = adenosine-3'-phosphate
  modified_base 13: mod_base = OTHER; note = uridine-3'-phosphate
  modified_base 14: mod_base = OTHER; note = adenosine-3'-phosphate
  modified_base 15: mod_base = OTHER; note = uridine-3'-phosphate
  modified_base 16: mod_base = OTHER; note = uridine-3'-phosphate
  modified_base 17: mod_base = OTHER; note = cytidine-3'-phosphate
  modified_base 18: mod_base = OTHER; note = uridine-3'-phosphate
  modified_base 19: mod_base = OTHER; note = cytidine-3'-phosphate
  misc_feature 1..19: note = RNA
  misc_feature 20..21: note = DNA
gatgcagatgcatattctctt

SEQ ID NO: 1944 - DNA, 21 bp, synthetic construct
  source 1..21: mol_type = other DNA
  modified_base 1: mod_base = OTHER; note = guanosine-3'-phosphate
  modified_base 2: mod_base = OTHER; note = cytidine-3'-phosphate
  modified_base 3: mod_base = OTHER; note = adenosine-3'-phosphate
  modified_base 4: mod_base = OTHER; note = uridine-3'-phosphate
  modified_base 5: mod_base = OTHER; note = adenosine-3'-phosphate
  modified_base 6: mod_base = OTHER; note = uridine-3'-phosphate
  modified_base 7: mod_base = OTHER; note = uridine-3'-phosphate
  modified_base 8: mod_base = OTHER; note = cytidine-3'-phosphate
  modified_base 9: mod_base = OTHER; note = uridine-3'-phosphate
  modified_base 10: mod_base = OTHER; note = cytidine-3'-phosphate
  modified_base 11: mod_base = OTHER; note = cytidine-3'-phosphate
  modified_base 12: mod_base = OTHER; note = adenosine-3'-phosphate
  modified_base 13: mod_base = OTHER; note = guanosine-3'-phosphate
  modified_base 14: mod_base = OTHER; note = guanosine-3'-phosphate
  modified_base 15: mod_base = OTHER; note = cytidine-3'-phosphate
  modified_base 16: mod_base = OTHER; note = cytidine-3'-phosphate
  modified_base 17: mod_base = OTHER; note = adenosine-3'-phosphate
  modified_base 18: mod_base = OTHER; note = adenosine-3'-phosphate
  modified_base 19: mod_base = OTHER; note = adenosine-3'-phosphate
  misc_feature 1..19: note = RNA
  misc_feature 20..21: note = DNA
gcatattctccaggccaaatt

SEQ ID NO: 1945 - DNA, 21 bp, synthetic construct
  source 1..21: mol_type = other DNA
  modified_base 1: mod_base = OTHER; note = adenosine-3'-phosphate
  modified_base 2: mod_base = OTHER; note = guanosine-3'-phosphate
  modified_base 3: mod_base = OTHER; note = guanosine-3'-phosphate
  modified_base 4: mod_base = OTHER; note = cytidine-3'-phosphate
  modified_base 5: mod_base = OTHER; note = cytidine-3'-phosphate
  modified_base 6: mod_base = OTHER; note = adenosine-3'-phosphate
  modified_base 7: mod_base = OTHER; note = adenosine-3'-phosphate
  modified_base 8: mod_base = OTHER; note = adenosine-3'-phosphate
  modified_base 9: mod_base = OTHER; note = cytidine-3'-phosphate
  modified_base 10: mod_base = OTHER; note = uridine-3'-phosphate
  modified_base 11: mod_base = OTHER; note = guanosine-3'-phosphate
  modified_base 12: mod_base = OTHER; note = uridine-3'-phosphate
  modified_base 13: mod_base = OTHER; note = guanosine-3'-phosphate
  modified_base 14: mod_base = OTHER; note = uridine-3'-phosphate
  modified_base 15: mod_base = OTHER; note = cytidine-3'-phosphate
  modified_base 16: mod_base = OTHER; note = uridine-3'-phosphate
  modified_base 17: mod_base = OTHER; note = cytidine-3'-phosphate
  modified_base 18: mod_base = OTHER; note = uridine-3'-phosphate
  modified_base 19: mod_base = OTHER; note = uridine-3'-phosphate
  misc_feature 1..19: note = RNA
  misc_feature 20..21: note = DNA
aggccaaactgtgtctctttt

SEQ ID NO: 1946 - DNA, 21 bp, synthetic construct
  source 1..21: mol_type = other DNA
  modified_base 1: mod_base = OTHER; note = guanosine-3'-phosphate
  modified_base 2: mod_base = OTHER; note = uridine-3'-phosphate
  modified_base 3: mod_base = OTHER; note = guanosine-3'-phosphate
  modified_base 4: mod_base = OTHER; note = uridine-3'-phosphate
  modified_base 5: mod_base = OTHER; note = cytidine-3'-phosphate
  modified_base 6: mod_base = OTHER; note = uridine-3'-phosphate
  modified_base 7: mod_base = OTHER; note = cytidine-3'-phosphate
  modified_base 8: mod_base = OTHER; note = uridine-3'-phosphate
  modified_base 9: mod_base = OTHER; note = uridine-3'-phosphate
  modified_base 10: mod_base = OTHER; note = adenosine-3'-phosphate
  modified_base 11: mod_base = OTHER; note = adenosine-3'-phosphate
  modified_base 12: mod_base = OTHER; note = uridine-3'-phosphate
  modified_base 13: mod_base = OTHER; note = adenosine-3'-phosphate
  modified_base 14: mod_base = OTHER; note = uridine-3'-phosphate
  modified_base 15: mod_base = OTHER; note = guanosine-3'-phosphate
  modified_base 16: mod_base = OTHER; note = guanosine-3'-phosphate
  modified_base 17: mod_base = OTHER; note = cytidine-3'-phosphate
  modified_base 18: mod_base = OTHER; note = adenosine-3'-phosphate
  modified_base 19: mod_base = OTHER; note = adenosine-3'-phosphate
  misc_feature 1..19: note = RNA
  misc_feature 20..21: note = DNA
gtgtctcttaatatggcaatt

SEQ ID NO: 1947 - DNA, 21 bp, synthetic construct
  source 1..21: mol_type = other DNA
  modified_base 1: mod_base = OTHER; note = uridine-3'-phosphate
  modified_base 2: mod_base = OTHER; note = uridine-3'-phosphate
  modified_base 3: mod_base = OTHER; note = adenosine-3'-phosphate
  modified_base 4: mod_base = OTHER; note = adenosine-3'-phosphate
  modified_base 5: mod_base = OTHER; note = uridine-3'-phosphate
  modified_base 6: mod_base = OTHER; note = adenosine-3'-phosphate
  modified_base 7: mod_base = OTHER; note = uridine-3'-phosphate
  modified_base 8: mod_base = OTHER; note = guanosine-3'-phosphate
  modified_base 9: mod_base = OTHER; note = guanosine-3'-phosphate
  modified_base 10: mod_base = OTHER; note = cytidine-3'-phosphate
  modified_base 11: mod_base = OTHER; note = adenosine-3'-phosphate
  modified_base 12: mod_base = OTHER; note = adenosine-3'-phosphate
  modified_base 13: mod_base = OTHER; note = cytidine-3'-phosphate
  modified_base 14: mod_base = OTHER; note = uridine-3'-phosphate
  modified_base 15: mod_base = OTHER; note = guanosine-3'-phosphate
  modified_base 16: mod_base = OTHER; note = guanosine-3'-phosphate
  modified_base 17: mod_base = OTHER; note = adenosine-3'-phosphate
  modified_base 18: mod_base = OTHER; note = adenosine-3'-phosphate
  modified_base 19: mod_base = OTHER; note = uridine-3'-phosphate
  misc_feature 1..19: note = RNA
  misc_feature 20..21: note = DNA
ttaatatggcaactggaattt

SEQ ID NO: 1948 - DNA, 21 bp, synthetic construct
  source 1..21: mol_type = other DNA
  modified_base 1: mod_base = OTHER; note = adenosine-3'-phosphate
  modified_base 2: mod_base = OTHER; note = adenosine-3'-phosphate
  modified_base 3: mod_base = OTHER; note = cytidine-3'-phosphate
  modified_base 4: mod_base = OTHER; note = uridine-3'-phosphate
  modified_base 5: mod_base = OTHER; note = guanosine-3'-phosphate
  modified_base 6: mod_base = OTHER; note = guanosine-3'-phosphate
  modified_base 7: mod_base = OTHER; note = adenosine-3'-phosphate
  modified_base 8: mod_base = OTHER; note = adenosine-3'-phosphate
  modified_base 9: mod_base = OTHER; note = uridine-3'-phosphate
  modified_base 10: mod_base = OTHER; note = guanosine-3'-phosphate
  modified_base 11: mod_base = OTHER; note = guanosine-3'-phosphate
  modified_base 12: mod_base = OTHER; note = adenosine-3'-phosphate
  modified_base 13: mod_base = OTHER; note = uridine-3'-phosphate
  modified_base 14: mod_base = OTHER; note = uridine-3'-phosphate
  modified_base 15: mod_base = OTHER; note = cytidine-3'-phosphate
  modified_base 16: mod_base = OTHER; note = cytidine-3'-phosphate
  modified_base 17: mod_base = OTHER; note = uridine-3'-phosphate
  modified_base 18: mod_base = OTHER; note = guanosine-3'-phosphate
  modified_base 19: mod_base = OTHER; note = guanosine-3'-phosphate
  misc_feature 1..19: note = RNA
  misc_feature 20..21: note = DNA
aactggaatggattcctggtt

SEQ ID NO: 1949 - DNA, 21 bp, synthetic construct
  source 1..21: mol_type = other DNA
  modified_base 1: mod_base = OTHER; note = uridine-3'-phosphate
  modified_base 2: mod_base = OTHER; note = uridine-3'-phosphate
  modified_base 3: mod_base = OTHER; note = cytidine-3'-phosphate
  modified_base 4: mod_base = OTHER; note = cytidine-3'-phosphate
  modified_base 5: mod_base = OTHER; note = uridine-3'-phosphate
  modified_base 6: mod_base = OTHER; note = guanosine-3'-phosphate
  modified_base 7: mod_base = OTHER; note = guanosine-3'-phosphate
  modified_base 8: mod_base = OTHER; note = guanosine-3'-phosphate
  modified_base 9: mod_base = OTHER; note = uridine-3'-phosphate
  modified_base 10: mod_base = OTHER; note = guanosine-3'-phosphate
  modified_base 11: mod_base = OTHER; note = guanosine-3'-phosphate
  modified_base 12: mod_base = OTHER; note = cytidine-3'-phosphate
  modified_base 13: mod_base = OTHER; note = adenosine-3'-phosphate
  modified_base 14: mod_base = OTHER; note = uridine-3'-phosphate
  modified_base 15: mod_base = OTHER; note = uridine-3'-phosphate
  modified_base 16: mod_base = OTHER; note = adenosine-3'-phosphate
  modified_base 17: mod_base = OTHER; note = guanosine-3'-phosphate
  modified_base 18: mod_base = OTHER; note = cytidine-3'-phosphate
  modified_base 19: mod_base = OTHER; note = adenosine-3'-phosphate
  misc_feature 1..19: note = RNA
  misc_feature 20..21: note = DNA
ttcctgggtggcattagcatt

SEQ ID NO: 1950 - DNA, 21 bp, synthetic construct
  source 1..21: mol_type = other DNA
  modified_base 1: mod_base = OTHER; note = guanosine-3'-phosphate
  modified_base 2: mod_base = OTHER; note = guanosine-3'-phosphate
  modified_base 3: mod_base = OTHER; note = cytidine-3'-phosphate
  modified_base 4: mod_base = OTHER; note = adenosine-3'-phosphate
  modified_base 5: mod_base = OTHER; note = uridine-3'-phosphate
  modified_base 6: mod_base = OTHER; note = uridine-3'-phosphate
  modified_base 7: mod_base = OTHER; note = adenosine-3'-phosphate
  modified_base 8: mod_base = OTHER; note = guanosine-3'-phosphate
  modified_base 9: mod_base = OTHER; note = cytidine-3'-phosphate
  modified_base 10: mod_base = OTHER; note = adenosine-3'-phosphate
  modified_base 11: mod_base = OTHER; note = guanosine-3'-phosphate
  modified_base 12: mod_base = OTHER; note = cytidine-3'-phosphate
  modified_base 13: mod_base = OTHER; note = adenosine-3'-phosphate
  modified_base 14: mod_base = OTHER; note = guanosine-3'-phosphate
  modified_base 15: mod_base = OTHER; note = uridine-3'-phosphate
  modified_base 16: mod_base = OTHER; note = guanosine-3'-phosphate
  modified_base 17: mod_base = OTHER; note = guanosine-3'-phosphate
  modified_base 18: mod_base = OTHER; note = adenosine-3'-phosphate
  modified_base 19: mod_base = OTHER; note = cytidine-3'-phosphate
  misc_feature 1..19: note = RNA
  misc_feature 20..21: note = DNA
ggcattagcagcagtggactt

SEQ ID NO: 1951 - DNA, 21 bp, synthetic construct
  source 1..21: mol_type = other DNA
  modified_base 1: mod_base = OTHER; note = adenosine-3'-phosphate
  modified_base 2: mod_base = OTHER; note = guanosine-3'-phosphate
  modified_base 3: mod_base = OTHER; note = uridine-3'-phosphate
  modified_base 4: mod_base = OTHER; note = guanosine-3'-phosphate
  modified_base 5: mod_base = OTHER; note = guanosine-3'-phosphate
  modified_base 6: mod_base = OTHER; note = adenosine-3'-phosphate
  modified_base 7: mod_base = OTHER; note = cytidine-3'-phosphate
  modified_base 8: mod_base = OTHER; note = adenosine-3'-phosphate
  modified_base 9: mod_base = OTHER; note = guanosine-3'-phosphate
  modified_base 10: mod_base = OTHER; note = uridine-3'-phosphate
  modified_base 11: mod_base = OTHER; note = guanosine-3'-phosphate
  modified_base 12: mod_base = OTHER; note = cytidine-3'-phosphate
  modified_base 13: mod_base = OTHER; note = uridine-3'-phosphate
  modified_base 14: mod_base = OTHER; note = guanosine-3'-phosphate
  modified_base 15: mod_base = OTHER; note = uridine-3'-phosphate
  modified_base 16: mod_base = OTHER; note = guanosine-3'-phosphate
  modified_base 17: mod_base = OTHER; note = uridine-3'-phosphate
  modified_base 18: mod_base = OTHER; note = adenosine-3'-phosphate
  modified_base 19: mod_base = OTHER; note = uridine-3'-phosphate
  misc_feature 1..19: note = RNA
  misc_feature 20..21: note = DNA
agtggacagtgctgtgtattt

SEQ ID NO: 1952 - DNA, 21 bp, synthetic construct
  source 1..21: mol_type = other DNA
  modified_base 1: mod_base = OTHER; note = guanosine-3'-phosphate
  modified_base 2: mod_base = OTHER; note = cytidine-3'-phosphate
  modified_base 3: mod_base = OTHER; note = uridine-3'-phosphate
  modified_base 4: mod_base = OTHER; note = guanosine-3'-phosphate
  modified_base 5: mod_base = OTHER; note = uridine-3'-phosphate
  modified_base 6: mod_base = OTHER; note = guanosine-3'-phosphate
  modified_base 7: mod_base = OTHER; note = uridine-3'-phosphate
  modified_base 8: mod_base = OTHER; note = adenosine-3'-phosphate
  modified_base 9: mod_base = OTHER; note = uridine-3'-phosphate
  modified_base 10: mod_base = OTHER; note = guanosine-3'-phosphate
  modified_base 11: mod_base = OTHER; note = guanosine-3'-phosphate
  modified_base 12: mod_base = OTHER; note = adenosine-3'-phosphate
  modified_base 13: mod_base = OTHER; note = guanosine-3'-phosphate
  modified_base 14: mod_base = OTHER; note = uridine-3'-phosphate
  modified_base 15: mod_base = OTHER; note = cytidine-3'-phosphate
  modified_base 16: mod_base = OTHER; note = cytidine-3'-phosphate
  modified_base 17: mod_base = OTHER; note = adenosine-3'-phosphate
  modified_base 18: mod_base = OTHER; note = adenosine-3'-phosphate
  modified_base 19: mod_base = OTHER; note = adenosine-3'-phosphate
  misc_feature 1..19: note = RNA
  misc_feature 20..21: note = DNA
gctgtgtatggagtccaaatt

SEQ ID NO: 1953 - DNA, 21 bp, synthetic construct
  source 1..21: mol_type = other DNA
  modified_base 1: mod_base = OTHER; note = adenosine-3'-phosphate
  modified_base 2: mod_base = OTHER; note = guanosine-3'-phosphate
  modified_base 3: mod_base = OTHER; note = uridine-3'-phosphate
  modified_base 4: mod_base = OTHER; note = cytidine-3'-phosphate
  modified_base 5: mod_base = OTHER; note = cytidine-3'-phosphate
  modified_base 6: mod_base = OTHER; note = adenosine-3'-phosphate
  modified_base 7: mod_base = OTHER; note = adenosine-3'-phosphate
  modified_base 8: mod_base = OTHER; note = adenosine-3'-phosphate
  modified_base 9: mod_base = OTHER; note = guanosine-3'-phosphate
  modified_base 10: mod_base = OTHER; note = adenosine-3'-phosphate
  modified_base 11: mod_base = OTHER; note = guanosine-3'-phosphate
  modified_base 12: mod_base = OTHER; note = guanosine-3'-phosphate
  modified_base 13: mod_base = OTHER; note = adenosine-3'-phosphate
  modified_base 14: mod_base = OTHER; note = guanosine-3'-phosphate
  modified_base 15: mod_base = OTHER; note = cytidine-3'-phosphate
  modified_base 16: mod_base = OTHER; note = cytidine-3'-phosphate
  modified_base 17: mod_base = OTHER; note = adenosine-3'-phosphate
  modified_base 18: mod_base = OTHER; note = adenosine-3'-phosphate
  modified_base 19: mod_base = OTHER; note = adenosine-3'-phosphate
  misc_feature 1..19: note = RNA
  misc_feature 20..21: note = DNA
agtccaaagaggagccaaatt

SEQ ID NO: 1954 - DNA, 21 bp, synthetic construct
  source 1..21: mol_type = other DNA
  modified_base 1: mod_base = OTHER; note = adenosine-3'-phosphate
  modified_base 2: mod_base = OTHER; note = guanosine-3'-phosphate
  modified_base 3: mod_base = OTHER; note = adenosine-3'-phosphate
  modified_base 4: mod_base = OTHER; note = guanosine-3'-phosphate
  modified_base 5: mod_base = OTHER; note = guanosine-3'-phosphate
  modified_base 6: mod_base = OTHER; note = adenosine-3'-phosphate
  modified_base 7: mod_base = OTHER; note = guanosine-3'-phosphate
  modified_base 8: mod_base = OTHER; note = cytidine-3'-phosphate
  modified_base 9: mod_base = OTHER; note = cytidine-3'-phosphate
  modified_base 10: mod_base = OTHER; note = adenosine-3'-phosphate
  modified_base 11: mod_base = OTHER; note = adenosine-3'-phosphate
  modified_base 12: mod_base = OTHER; note = adenosine-3'-phosphate
  modified_base 13: mod_base = OTHER; note = adenosine-3'-phosphate
  modified_base 14: mod_base = OTHER; note = adenosine-3'-phosphate
  modified_base 15: mod_base = OTHER; note = guanosine-3'-phosphate
  modified_base 16: mod_base = OTHER; note = cytidine-3'-phosphate
  modified_base 17: mod_base = OTHER; note = cytidine-3'-phosphate
  modified_base 18: mod_base = OTHER; note = cytidine-3'-phosphate
  modified_base 19: mod_base = OTHER; note = uridine-3'-phosphate
  misc_feature 1..19: note = RNA
  misc_feature 20..21: note = DNA
agaggagccaaaaagcccttt

SEQ ID NO: 1955 - DNA, 21 bp, synthetic construct
  source 1..21: mol_type = other DNA
  modified_base 1: mod_base = OTHER; note = adenosine-3'-phosphate
  modified_base 2: mod_base = OTHER; note = guanosine-3'-phosphate
  modified_base 3: mod_base = OTHER; note = cytidine-3'-phosphate
  modified_base 4: mod_base = OTHER; note = cytidine-3'-phosphate
  modified_base 5: mod_base = OTHER; note = cytidine-3'-phosphate
  modified_base 6: mod_base = OTHER; note = uridine-3'-phosphate
  modified_base 7: mod_base = OTHER; note = uridine-3'-phosphate
  modified_base 8: mod_base = OTHER; note = guanosine-3'-phosphate
  modified_base 9: mod_base = OTHER; note = guanosine-3'-phosphate
  modified_base 10: mod_base = OTHER; note = adenosine-3'-phosphate
  modified_base 11: mod_base = OTHER; note = adenosine-3'-phosphate
  modified_base 12: mod_base = OTHER; note = adenosine-3'-phosphate
  modified_base 13: mod_base = OTHER; note = guanosine-3'-phosphate
  modified_base 14: mod_base = OTHER; note = adenosine-3'-phosphate
  modified_base 15: mod_base = OTHER; note = guanosine-3'-phosphate
  modified_base 16: mod_base = OTHER; note = uridine-3'-phosphate
  modified_base 17: mod_base = OTHER; note = adenosine-3'-phosphate
  modified_base 18: mod_base = OTHER; note = uridine-3'-phosphate
  modified_base 19: mod_base = OTHER; note = uridine-3'-phosphate
  misc_feature 1..19: note = RNA
  misc_feature 20..21: note = DNA
agcccttggaaagagtatttt

SEQ ID NO: 1956 - DNA, 21 bp, synthetic construct
  source 1..21: mol_type = other DNA
  modified_base 1: mod_base = OTHER; note = adenosine-3'-phosphate
  modified_base 2: mod_base = OTHER; note = adenosine-3'-phosphate
  modified_base 3: mod_base = OTHER; note = guanosine-3'-phosphate
  modified_base 4: mod_base = OTHER; note = adenosine-3'-phosphate
  modified_base 5: mod_base = OTHER; note = guanosine-3'-phosphate
  modified_base 6: mod_base = OTHER; note = uridine-3'-phosphate
  modified_base 7: mod_base = OTHER; note = adenosine-3'-phosphate
  modified_base 8: mod_base = OTHER; note = uridine-3'-phosphate
  modified_base 9: mod_base = OTHER; note = uridine-3'-phosphate
  modified_base 10: mod_base = OTHER; note = uridine-3'-phosphate
  modified_base 11: mod_base = OTHER; note = cytidine-3'-phosphate
  modified_base 12: mod_base = OTHER; note = adenosine-3'-phosphate
  modified_base 13: mod_base = OTHER; note = adenosine-3'-phosphate
  modified_base 14: mod_base = OTHER; note = uridine-3'-phosphate
  modified_base 15: mod_base = OTHER; note = uridine-3'-phosphate
  modified_base 16: mod_base = OTHER; note = cytidine-3'-phosphate
  modified_base 17: mod_base = OTHER; note = uridine-3'-phosphate
  modified_base 18: mod_base = OTHER; note = uridine-3'-phosphate
  modified_base 19: mod_base = OTHER; note = adenosine-3'-phosphate
  misc_feature 1..19: note = RNA
  misc_feature 20..21: note = DNA
aagagtatttcaattcttatt

SEQ ID NO: 1957 - DNA, 21 bp, synthetic construct
  source 1..21: mol_type = other DNA
  modified_base 1: mod_base = OTHER; note = uridine-3'-phosphate
  modified_base 2: mod_base = OTHER; note = uridine-3'-phosphate
  modified_base 3: mod_base = OTHER; note = uridine-3'-phosphate
  modified_base 4: mod_base = OTHER; note = cytidine-3'-phosphate
  modified_base 5: mod_base = OTHER; note = adenosine-3'-phosphate
  modified_base 6: mod_base = OTHER; note = adenosine-3'-phosphate
  modified_base 7: mod_base = OTHER; note = uridine-3'-phosphate
  modified_base 8: mod_base = OTHER; note = uridine-3'-phosphate
  modified_base 9: mod_base = OTHER; note = cytidine-3'-phosphate
  modified_base 10: mod_base = OTHER; note = uridine-3'-phosphate
  modified_base 11: mod_base = OTHER; note = uridine-3'-phosphate
  modified_base 12: mod_base = OTHER; note = adenosine-3'-phosphate
  modified_base 13: mod_base = OTHER; note = guanosine-3'-phosphate
  modified_base 14: mod_base = OTHER; note = adenosine-3'-phosphate
  modified_base 15: mod_base = OTHER; note = guanosine-3'-phosphate
  modified_base 16: mod_base = OTHER; note = adenosine-3'-phosphate
  modified_base 17: mod_base = OTHER; note = adenosine-3'-phosphate
  modified_base 18: mod_base = OTHER; note = guanosine-3'-phosphate
  modified_base 19: mod_base = OTHER; note = adenosine-3'-phosphate
  misc_feature 1..19: note = RNA
  misc_feature 20..21: note = DNA
tttcaattcttagagaagatt

SEQ ID NO: 1958 - DNA, 21 bp, synthetic construct
  source 1..21: mol_type = other DNA
  modified_base 1: mod_base = OTHER; note = guanosine-3'-phosphate
  modified_base 2: mod_base = OTHER; note = adenosine-3'-phosphate
  modified_base 3: mod_base = OTHER; note = guanosine-3'-phosphate
  modified_base 4: mod_base = OTHER; note = adenosine-3'-phosphate
  modified_base 5: mod_base = OTHER; note = adenosine-3'-phosphate
  modified_base 6: mod_base = OTHER; note = guanosine-3'-phosphate
  modified_base 7: mod_base = OTHER; note = adenosine-3'-phosphate
  modified_base 8: mod_base = OTHER; note = guanosine-3'-phosphate
  modified_base 9: mod_base = OTHER; note = uridine-3'-phosphate
  modified_base 10: mod_base = OTHER; note = guanosine-3'-phosphate
  modified_base 11: mod_base = OTHER; note = adenosine-3'-phosphate
  modified_base 12: mod_base = OTHER; note = uridine-3'-phosphate
  modified_base 13: mod_base = OTHER; note = cytidine-3'-phosphate
  modified_base 14: mod_base = OTHER; note = uridine-3'-phosphate
  modified_base 15: mod_base = OTHER; note = guanosine-3'-phosphate
  modified_base 16: mod_base = OTHER; note = guanosine-3'-phosphate
  modified_base 17: mod_base = OTHER; note = guanosine-3'-phosphate
  modified_base 18: mod_base = OTHER; note = cytidine-3'-phosphate
  modified_base 19: mod_base = OTHER; note = uridine-3'-phosphate
  misc_feature 1..19: note = RNA
  misc_feature 20..21: note = DNA
gagaagagtgatctgggcttt

SEQ ID NO: 1959 - DNA, 21 bp, synthetic construct
  source 1..21: mol_type = other DNA
  modified_base 1: mod_base = OTHER; note = uridine-3'-phosphate
  modified_base 2: mod_base = OTHER; note = guanosine-3'-phosphate
  modified_base 3: mod_base = OTHER; note = adenosine-3'-phosphate
  modified_base 4: mod_base = OTHER; note = uridine-3'-phosphate
  modified_base 5: mod_base = OTHER; note = cytidine-3'-phosphate
  modified_base 6: mod_base = OTHER; note = uridine-3'-phosphate
  modified_base 7: mod_base = OTHER; note = guanosine-3'-phosphate
  modified_base 8: mod_base = OTHER; note = guanosine-3'-phosphate
  modified_base 9: mod_base = OTHER; note = guanosine-3'-phosphate
  modified_base 10: mod_base = OTHER; note = cytidine-3'-phosphate
  modified_base 11: mod_base = OTHER; note = uridine-3'-phosphate
  modified_base 12: mod_base = OTHER; note = guanosine-3'-phosphate
  modified_base 13: mod_base = OTHER; note = uridine-3'-phosphate
  modified_base 14: mod_base = OTHER; note = guanosine-3'-phosphate
  modified_base 15: mod_base = OTHER; note = guanosine-3'-phosphate
  modified_base 16: mod_base = OTHER; note = guanosine-3'-phosphate
  modified_base 17: mod_base = OTHER; note = guanosine-3'-phosphate
  modified_base 18: mod_base = OTHER; note = cytidine-3'-phosphate
  modified_base 19: mod_base = OTHER; note = adenosine-3'-phosphate
  misc_feature 1..19: note = RNA
  misc_feature 20..21: note = DNA
tgatctgggctgtggggcatt

SEQ ID NO: 1960 - DNA, 21 bp, synthetic construct
  source 1..21: mol_type = other DNA
  modified_base 1: mod_base = OTHER; note = guanosine-3'-phosphate
  modified_base 2: mod_base = OTHER; note = guanosine-3'-phosphate
  modified_base 3: mod_base = OTHER; note = guanosine-3'-phosphate
  modified_base 4: mod_base = OTHER; note = guanosine-3'-phosphate
  modified_base 5: mod_base = OTHER; note = cytidine-3'-phosphate
  modified_base 6: mod_base = OTHER; note = adenosine-3'-phosphate
  modified_base 7: mod_base = OTHER; note = guanosine-3'-phosphate
  modified_base 8: mod_base = OTHER; note = guanosine-3'-phosphate
  modified_base 9: mod_base = OTHER; note = uridine-3'-phosphate
  modified_base 10: mod_base = OTHER; note = guanosine-3'-phosphate
  modified_base 11: mod_base = OTHER; note = guanosine-3'-phosphate
  modified_base 12: mod_base = OTHER; note = uridine-3'-phosphate
  modified_base 13: mod_base = OTHER; note = guanosine-3'-phosphate
  modified_base 14: mod_base = OTHER; note = guanosine-3'-phosphate
  modified_base 15: mod_base = OTHER; note = cytidine-3'-phosphate
  modified_base 16: mod_base = OTHER; note = cytidine-3'-phosphate
  modified_base 17: mod_base = OTHER; note = uridine-3'-phosphate
  modified_base 18: mod_base = OTHER; note = cytidine-3'-phosphate
  modified_base 19: mod_base = OTHER; note = adenosine-3'-phosphate
  misc_feature 1..19: note = RNA
  misc_feature 20..21: note = DNA
ggggcaggtggtggcctcatt

SEQ ID NO: 1961 - DNA, 21 bp, synthetic construct
  source 1..21: mol_type = other DNA
  modified_base 1: mod_base = OTHER; note = guanosine-3'-phosphate
  modified_base 2: mod_base = OTHER; note = uridine-3'-phosphate
  modified_base 3: mod_base = OTHER; note = guanosine-3'-phosphate
  modified_base 4: mod_base = OTHER; note = guanosine-3'-phosphate
  modified_base 5: mod_base = OTHER; note = cytidine-3'-phosphate
  modified_base 6: mod_base = OTHER; note = cytidine-3'-phosphate
  modified_base 7: mod_base = OTHER; note = uridine-3'-phosphate
  modified_base 8: mod_base = OTHER; note = cytidine-3'-phosphate
  modified_base 9: mod_base = OTHER; note = adenosine-3'-phosphate
  modified_base 10: mod_base = OTHER; note = adenosine-3'-phosphate
  modified_base 11: mod_base = OTHER; note = cytidine-3'-phosphate
  modified_base 12: mod_base = OTHER; note = adenosine-3'-phosphate
  modified_base 13: mod_base = OTHER; note = adenosine-3'-phosphate
  modified_base 14: mod_base = OTHER; note = uridine-3'-phosphate
  modified_base 15: mod_base = OTHER; note = guanosine-3'-phosphate
  modified_base 16: mod_base = OTHER; note = cytidine-3'-phosphate
  modified_base 17: mod_base = OTHER; note = cytidine-3'-phosphate
  modified_base 18: mod_base = OTHER; note = adenosine-3'-phosphate
  modified_base 19: mod_base = OTHER; note = adenosine-3'-phosphate
  misc_feature 1..19: note = RNA
  misc_feature 20..21: note = DNA
gtggcctcaacaatgccaatt

SEQ ID NO: 1962 - DNA, 21 bp, synthetic construct
  source 1..21: mol_type = other DNA
  modified_base 1: mod_base = OTHER; note = cytidine-3'-phosphate
  modified_base 2: mod_base = OTHER; note = adenosine-3'-phosphate
  modified_base 3: mod_base = OTHER; note = adenosine-3'-phosphate
  modified_base 4: mod_base = OTHER; note = cytidine-3'-phosphate
  modified_base 5: mod_base = OTHER; note = adenosine-3'-phosphate
  modified_base 6: mod_base = OTHER; note = adenosine-3'-phosphate
  modified_base 7: mod_base = OTHER; note = uridine-3'-phosphate
  modified_base 8: mod_base = OTHER; note = guanosine-3'-phosphate
  modified_base 9: mod_base = OTHER; note = cytidine-3'-phosphate
  modified_base 10: mod_base = OTHER; note = cytidine-3'-phosphate
  modified_base 11: mod_base = OTHER; note = adenosine-3'-phosphate
  modified_base 12: mod_base = OTHER; note = adenosine-3'-phosphate
  modified_base 13: mod_base = OTHER; note = uridine-3'-phosphate
  modified_base 14: mod_base = OTHER; note = guanosine-3'-phosphate
  modified_base 15: mod_base = OTHER; note = uridine-3'-phosphate
  modified_base 16: mod_base = OTHER; note = guanosine-3'-phosphate
  modified_base 17: mod_base = OTHER; note = uridine-3'-phosphate
  modified_base 18: mod_base = OTHER; note = uridine-3'-phosphate
  modified_base 19: mod_base = OTHER; note = cytidine-3'-phosphate
  misc_feature 1..19: note = RNA
  misc_feature 20..21: note = DNA
caacaatgccaatgtgttctt

SEQ ID NO: 1963 - DNA, 21 bp, synthetic construct
  source 1..21: mol_type = other DNA
  modified_base 1: mod_base = OTHER; note = cytidine-3'-phosphate
  modified_base 2: mod_base = OTHER; note = adenosine-3'-phosphate
  modified_base 3: mod_base = OTHER; note = adenosine-3'-phosphate
  modified_base 4: mod_base = OTHER; note = uridine-3'-phosphate
  modified_base 5: mod_base = OTHER; note = guanosine-3'-phosphate
  modified_base 6: mod_base = OTHER; note = uridine-3'-phosphate
  modified_base 7: mod_base = OTHER; note = guanosine-3'-phosphate
  modified_base 8: mod_base = OTHER; note = uridine-3'-phosphate
  modified_base 9: mod_base = OTHER; note = uridine-3'-phosphate
  modified_base 10: mod_base = OTHER; note = cytidine-3'-phosphate
  modified_base 11: mod_base = OTHER; note = cytidine-3'-phosphate
  modified_base 12: mod_base = OTHER; note = adenosine-3'-phosphate
  modified_base 13: mod_base = OTHER; note = cytidine-3'-phosphate
  modified_base 14: mod_base = OTHER; note = cytidine-3'-phosphate
  modified_base 15: mod_base = OTHER; note = uridine-3'-phosphate
  modified_base 16: mod_base = OTHER; note = adenosine-3'-phosphate
  modified_base 17: mod_base = OTHER; note = guanosine-3'-phosphate
  modified_base 18: mod_base = OTHER; note = cytidine-3'-phosphate
  modified_base 19: mod_base = OTHER; note = uridine-3'-phosphate
  misc_feature 1..19: note = RNA
  misc_feature 20..21: note = DNA
caatgtgttccacctagcttt

SEQ ID NO: 1964 - DNA, 21 bp, synthetic construct
  source 1..21: mol_type = other DNA
  modified_base 1: mod_base = OTHER; note = cytidine-3'-phosphate
  modified_base 2: mod_base = OTHER; note = adenosine-3'-phosphate
  modified_base 3: mod_base = OTHER; note = cytidine-3'-phosphate
  modified_base 4: mod_base = OTHER; note = cytidine-3'-phosphate
  modified_base 5: mod_base = OTHER; note = uridine-3'-phosphate
  modified_base 6: mod_base = OTHER; note = adenosine-3'-phosphate
  modified_base 7: mod_base = OTHER; note = guanosine-3'-phosphate
  modified_base 8: mod_base = OTHER; note = cytidine-3'-phosphate
  modified_base 9: mod_base = OTHER; note = uridine-3'-phosphate
  modified_base 10: mod_base = OTHER; note = guanosine-3'-phosphate
  modified_base 11: mod_base = OTHER; note = guanosine-3'-phosphate
  modified_base 12: mod_base = OTHER; note = adenosine-3'-phosphate
  modified_base 13: mod_base = OTHER; note = cytidine-3'-phosphate
  modified_base 14: mod_base = OTHER; note = uridine-3'-phosphate
  modified_base 15: mod_base = OTHER; note = uridine-3'-phosphate
  modified_base 16: mod_base = OTHER; note = adenosine-3'-phosphate
  modified_base 17: mod_base = OTHER; note = cytidine-3'-phosphate
  modified_base 18: mod_base = OTHER; note = cytidine-3'-phosphate
  modified_base 19: mod_base = OTHER; note = uridine-3'-phosphate
  misc_feature 1..19: note = RNA
  misc_feature 20..21: note = DNA
cacctagctggacttaccttt

SEQ ID NO: 1965 - DNA, 21 bp, synthetic construct
  source 1..21: mol_type = other DNA
  modified_base 1: mod_base = OTHER; note = guanosine-3'-phosphate
  modified_base 2: mod_base = OTHER; note = adenosine-3'-phosphate
  modified_base 3: mod_base = OTHER; note = cytidine-3'-phosphate
  modified_base 4: mod_base = OTHER; note = uridine-3'-phosphate
  modified_base 5: mod_base = OTHER; note = uridine-3'-phosphate
  modified_base 6: mod_base = OTHER; note = adenosine-3'-phosphate
  modified_base 7: mod_base = OTHER; note = cytidine-3'-phosphate
  modified_base 8: mod_base = OTHER; note = cytidine-3'-phosphate
  modified_base 9: mod_base = OTHER; note = uridine-3'-phosphate
  modified_base 10: mod_base = OTHER; note = uridine-3'-phosphate
  modified_base 11: mod_base = OTHER; note = cytidine-3'-phosphate
  modified_base 12: mod_base = OTHER; note = cytidine-3'-phosphate
  modified_base 13: mod_base = OTHER; note = uridine-3'-phosphate
  modified_base 14: mod_base = OTHER; note = cytidine-3'-phosphate
  modified_base 15: mod_base = OTHER; note = adenosine-3'-phosphate
  modified_base 16: mod_base = OTHER; note = cytidine-3'-phosphate
  modified_base 17: mod_base = OTHER; note = uridine-3'-phosphate
  modified_base 18: mod_base = OTHER; note = adenosine-3'-phosphate
  modified_base 19: mod_base = OTHER; note = adenosine-3'-phosphate
  misc_feature 1..19: note = RNA
  misc_feature 20..21: note = DNA
gacttaccttcctcactaatt

SEQ ID NO: 1966 - DNA, 21 bp, synthetic construct
  source 1..21: mol_type = other DNA
  modified_base 1: mod_base = OTHER; note = uridine-3'-phosphate
  modified_base 2: mod_base = OTHER; note = cytidine-3'-phosphate
  modified_base 3: mod_base = OTHER; note = adenosine-3'-phosphate
  modified_base 4: mod_base = OTHER; note = cytidine-3'-phosphate
  modified_base 5: mod_base = OTHER; note = uridine-3'-phosphate
  modified_base 6: mod_base = OTHER; note = adenosine-3'-phosphate
  modified_base 7: mod_base = OTHER; note = adenosine-3'-phosphate
  modified_base 8: mod_base = OTHER; note = uridine-3'-phosphate
  modified_base 9: mod_base = OTHER; note = guanosine-3'-phosphate
  modified_base 10: mod_base = OTHER; note = cytidine-3'-phosphate
  modified_base 11: mod_base = OTHER; note = adenosine-3'-phosphate
  modified_base 12: mod_base = OTHER; note = adenosine-3'-phosphate
  modified_base 13: mod_base = OTHER; note = adenosine-3'-phosphate
  modified_base 14: mod_base = OTHER; note = uridine-3'-phosphate
  modified_base 15: mod_base = OTHER; note = guanosine-3'-phosphate
  modified_base 16: mod_base = OTHER; note = cytidine-3'-phosphate
  modified_base 17: mod_base = OTHER; note = adenosine-3'-phosphate
  modified_base 18: mod_base = OTHER; note = guanosine-3'-phosphate
  modified_base 19: mod_base = OTHER; note = adenosine-3'-phosphate
  misc_feature 1..19: note = RNA
  misc_feature 20..21: note = DNA
tcactaatgcaaatgcagatt

SEQ ID NO: 1967 - DNA, 21 bp, synthetic construct
  source 1..21: mol_type = other DNA
  modified_base 1: mod_base = OTHER; note = adenosine-3'-phosphate
  modified_base 2: mod_base = OTHER; note = adenosine-3'-phosphate
  modified_base 3: mod_base = OTHER; note = adenosine-3'-phosphate
  modified_base 4: mod_base = OTHER; note = uridine-3'-phosphate
  modified_base 5: mod_base = OTHER; note = guanosine-3'-phosphate
  modified_base 6: mod_base = OTHER; note = cytidine-3'-phosphate
  modified_base 7: mod_base = OTHER; note = adenosine-3'-phosphate
  modified_base 8: mod_base = OTHER; note = guanosine-3'-phosphate
  modified_base 9: mod_base = OTHER; note = adenosine-3'-phosphate
  modified_base 10: mod_base = OTHER; note = uridine-3'-phosphate
  modified_base 11: mod_base = OTHER; note = guanosine-3'-phosphate
  modified_base 12: mod_base = OTHER; note = adenosine-3'-phosphate
  modified_base 13: mod_base = OTHER; note = cytidine-3'-phosphate
  modified_base 14: mod_base = OTHER; note = uridine-3'-phosphate
  modified_base 15: mod_base = OTHER; note = cytidine-3'-phosphate
  modified_base 16: mod_base = OTHER; note = cytidine-3'-phosphate
  modified_base 17: mod_base = OTHER; note = cytidine-3'-phosphate
  modified_base 18: mod_base = OTHER; note = adenosine-3'-phosphate
  modified_base 19: mod_base = OTHER; note = adenosine-3'-phosphate
  misc_feature 1..19: note = RNA
  misc_feature 20..21: note = DNA
aaatgcagatgactcccaatt

SEQ ID NO: 1968 - DNA, 21 bp, synthetic construct
  source 1..21: mol_type = other DNA
  modified_base 1: mod_base = OTHER; note = cytidine-3'-phosphate
  modified_base 2: mod_base = OTHER; note = uridine-3'-phosphate
  modified_base 3: mod_base = OTHER; note = cytidine-3'-phosphate
  modified_base 4: mod_base = OTHER; note = cytidine-3'-phosphate
  modified_base 5: mod_base = OTHER; note = cytidine-3'-phosphate
  modified_base 6: mod_base = OTHER; note = adenosine-3'-phosphate
  modified_base 7: mod_base = OTHER; note = adenosine-3'-phosphate
  modified_base 8: mod_base = OTHER; note = guanosine-3'-phosphate
  modified_base 9: mod_base = OTHER; note = adenosine-3'-phosphate
  modified_base 10: mod_base = OTHER; note = adenosine-3'-phosphate
  modified_base 11: mod_base = OTHER; note = adenosine-3'-phosphate
  modified_base 12: mod_base = OTHER; note = adenosine-3'-phosphate
  modified_base 13: mod_base = OTHER; note = uridine-3'-phosphate
  modified_base 14: mod_base = OTHER; note = guanosine-3'-phosphate
  modified_base 15: mod_base = OTHER; note = adenosine-3'-phosphate
  modified_base 16: mod_base = OTHER; note = uridine-3'-phosphate
  modified_base 17: mod_base = OTHER; note = guanosine-3'-phosphate
  modified_base 18: mod_base = OTHER; note = adenosine-3'-phosphate
  modified_base 19: mod_base = OTHER; note = adenosine-3'-phosphate
  misc_feature 1..19: note = RNA
  misc_feature 20..21: note = DNA
ctcccaagaaaatgatgaatt

SEQ ID NO: 1969 - DNA, 21 bp, synthetic construct
  source 1..21: mol_type = other DNA
  modified_base 1: mod_base = OTHER; note = cytidine-3'-phosphate
  modified_base 2: mod_base = OTHER; note = cytidine-3'-phosphate
  modified_base 3: mod_base = OTHER; note = uridine-3'-phosphate
  modified_base 4: mod_base = OTHER; note = uridine-3'-phosphate
  modified_base 5: mod_base = OTHER; note = guanosine-3'-phosphate
  modified_base 6: mod_base = OTHER; note = uridine-3'-phosphate
  modified_base 7: mod_base = OTHER; note = adenosine-3'-phosphate
  modified_base 8: mod_base = OTHER; note = adenosine-3'-phosphate
  modified_base 9: mod_base = OTHER; note = adenosine-3'-phosphate
  modified_base 10: mod_base = OTHER; note = guanosine-3'-phosphate
  modified_base 11: mod_base = OTHER; note = adenosine-3'-phosphate
  modified_base 12: mod_base = OTHER; note = adenosine-3'-phosphate
  modified_base 13: mod_base = OTHER; note = adenosine-3'-phosphate
  modified_base 14: mod_base = OTHER; note = uridine-3'-phosphate
  modified_base 15: mod_base = OTHER; note = uridine-3'-phosphate
  modified_base 16: mod_base = OTHER; note = cytidine-3'-phosphate
  modified_base 17: mod_base = OTHER; note = uridine-3'-phosphate
  modified_base 18: mod_base = OTHER; note = cytidine-3'-phosphate
  modified_base 19: mod_base = OTHER; note = adenosine-3'-phosphate
  misc_feature 1..19: note = RNA
  misc_feature 20..21: note = DNA
ccttgtaaagaaattctcatt

SEQ ID NO: 1970 - DNA, 21 bp, synthetic construct
  source 1..21: mol_type = other DNA
  modified_base 1: mod_base = OTHER; note = adenosine-3'-phosphate
  modified_base 2: mod_base = OTHER; note = adenosine-3'-phosphate
  modified_base 3: mod_base = OTHER; note = uridine-3'-phosphate
  modified_base 4: mod_base = OTHER; note = uridine-3'-phosphate
  modified_base 5: mod_base = OTHER; note = cytidine-3'-phosphate
  modified_base 6: mod_base = OTHER; note = uridine-3'-phosphate
  modified_base 7: mod_base = OTHER; note = cytidine-3'-phosphate
  modified_base 8: mod_base = OTHER; note = adenosine-3'-phosphate
  modified_base 9: mod_base = OTHER; note = guanosine-3'-phosphate
  modified_base 10: mod_base = OTHER; note = guanosine-3'-phosphate
  modified_base 11: mod_base = OTHER; note = cytidine-3'-phosphate
  modified_base 12: mod_base = OTHER; note = cytidine-3'-phosphate
  modified_base 13: mod_base = OTHER; note = adenosine-3'-phosphate
  modified_base 14: mod_base = OTHER; note = adenosine-3'-phosphate
  modified_base 15: mod_base = OTHER; note = guanosine-3'-phosphate
  modified_base 16: mod_base = OTHER; note = adenosine-3'-phosphate
  modified_base 17: mod_base = OTHER; note = adenosine-3'-phosphate
  modified_base 18: mod_base = OTHER; note = guanosine-3'-phosphate
  modified_base 19: mod_base = OTHER; note = adenosine-3'-phosphate
  misc_feature 1..19: note = RNA
  misc_feature 20..21: note = DNA
aattctcaggccaagaagatt

SEQ ID NO: 1971 - DNA, 21 bp, synthetic construct
  source 1..21: mol_type = other DNA
  modified_base 1: mod_base = OTHER; note = cytidine-3'-phosphate
  modified_base 2: mod_base = OTHER; note = cytidine-3'-phosphate
  modified_base 3: mod_base = OTHER; note = adenosine-3'-phosphate
  modified_base 4: mod_base = OTHER; note = adenosine-3'-phosphate
  modified_base 5: mod_base = OTHER; note = guanosine-3'-phosphate
  modified_base 6: mod_base = OTHER; note = adenosine-3'-phosphate
  modified_base 7: mod_base = OTHER; note = adenosine-3'-phosphate
  modified_base 8: mod_base = OTHER; note = guanosine-3'-phosphate
  modified_base 9: mod_base = OTHER; note = adenosine-3'-phosphate
  modified_base 10: mod_base = OTHER; note = adenosine-3'-phosphate
  modified_base 11: mod_base = OTHER; note = cytidine-3'-phosphate
  modified_base 12: mod_base = OTHER; note = guanosine-3'-phosphate
  modified_base 13: mod_base = OTHER; note = cytidine-3'-phosphate
  modified_base 14: mod_base = OTHER; note = uridine-3'-phosphate
  modified_base 15: mod_base = OTHER; note = guanosine-3'-phosphate
  modified_base 16: mod_base = OTHER; note = cytidine-3'-phosphate
  modified_base 17: mod_base = OTHER; note = adenosine-3'-phosphate
  modified_base 18: mod_base = OTHER; note = adenosine-3'-phosphate
  modified_base 19: mod_base = OTHER; note = adenosine-3'-phosphate
  misc_feature 1..19: note = RNA
  misc_feature 20..21: note = DNA
ccaagaagaacgctgcaaatt

SEQ ID NO: 1972 - DNA, 21 bp, synthetic construct
  source 1..21: mol_type = other DNA
  modified_base 1: mod_base = OTHER; note = cytidine-3'-phosphate
  modified_base 2: mod_base = OTHER; note = guanosine-3'-phosphate
  modified_base 3: mod_base = OTHER; note = cytidine-3'-phosphate
  modified_base 4: mod_base = OTHER; note = uridine-3'-phosphate
  modified_base 5: mod_base = OTHER; note = guanosine-3'-phosphate
  modified_base 6: mod_base = OTHER; note = cytidine-3'-phosphate
  modified_base 7: mod_base = OTHER; note = adenosine-3'-phosphate
  modified_base 8: mod_base = OTHER; note = adenosine-3'-phosphate
  modified_base 9: mod_base = OTHER; note = adenosine-3'-phosphate
  modified_base 10: mod_base = OTHER; note = adenosine-3'-phosphate
  modified_base 11: mod_base = OTHER; note = guanosine-3'-phosphate
  modified_base 12: mod_base = OTHER; note = adenosine-3'-phosphate
  modified_base 13: mod_base = OTHER; note = adenosine-3'-phosphate
  modified_base 14: mod_base = OTHER; note = guanosine-3'-phosphate
  modified_base 15: mod_base = OTHER; note = adenosine-3'-phosphate
  modified_base 16: mod_base = OTHER; note = uridine-3'-phosphate
  modified_base 17: mod_base = OTHER; note = adenosine-3'-phosphate
  modified_base 18: mod_base = OTHER; note = guanosine-3'-phosphate
  modified_base 19: mod_base = OTHER; note = adenosine-3'-phosphate
  misc_feature 1..19: note = RNA
  misc_feature 20..21: note = DNA
cgctgcaaaagaagatagatt

SEQ ID NO: 1973 - DNA, 21 bp, synthetic construct
  source 1..21: mol_type = other DNA
  modified_base 1: mod_base = OTHER; note = adenosine-3'-phosphate
  modified_base 2: mod_base = OTHER; note = adenosine-3'-phosphate
  modified_base 3: mod_base = OTHER; note = adenosine-3'-phosphate
  modified_base 4: mod_base = OTHER; note = guanosine-3'-phosphate
  modified_base 5: mod_base = OTHER; note = adenosine-3'-phosphate
  modified_base 6: mod_base = OTHER; note = adenosine-3'-phosphate
  modified_base 7: mod_base = OTHER; note = guanosine-3'-phosphate
  modified_base 8: mod_base = OTHER; note = adenosine-3'-phosphate
  modified_base 9: mod_base = OTHER; note = uridine-3'-phosphate
  modified_base 10: mod_base = OTHER; note = adenosine-3'-phosphate
  modified_base 11: mod_base = OTHER; note = guanosine-3'-phosphate
  modified_base 12: mod_base = OTHER; note = adenosine-3'-phosphate
  modified_base 13: mod_base = OTHER; note = adenosine-3'-phosphate
  modified_base 14: mod_base = OTHER; note = guanosine-3'-phosphate
  modified_base 15: mod_base = OTHER; note = adenosine-3'-phosphate
  modified_base 16: mod_base = OTHER; note = adenosine-3'-phosphate
  modified_base 17: mod_base = OTHER; note = adenosine-3'-phosphate
  modified_base 18: mod_base = OTHER; note = uridine-3'-phosphate
  modified_base 19: mod_base = OTHER; note = adenosine-3'-phosphate
  misc_feature 1..19: note = RNA
  misc_feature 20..21: note = DNA
aaagaagatagaagaaatatt

SEQ ID NO: 1974 - DNA, 21 bp, synthetic construct
  source 1..21: mol_type = other DNA
  modified_base 1: mod_base = OTHER; note = adenosine-3'-phosphate
  modified_base 2: mod_base = OTHER; note = guanosine-3'-phosphate
  modified_base 3: mod_base = OTHER; note = adenosine-3'-phosphate
  modified_base 4: mod_base = OTHER; note = adenosine-3'-phosphate
  modified_base 5: mod_base = OTHER; note = adenosine-3'-phosphate
  modified_base 6: mod_base = OTHER; note = uridine-3'-phosphate
  modified_base 7: mod_base = OTHER; note = adenosine-3'-phosphate
  modified_base 8: mod_base = OTHER; note = guanosine-3'-phosphate
  modified_base 9: mod_base = OTHER; note = cytidine-3'-phosphate
  modified_base 10: mod_base = OTHER; note = uridine-3'-phosphate
  modified_base 11: mod_base = OTHER; note = guanosine-3'-phosphate
  modified_base 12: mod_base = OTHER; note = cytidine-3'-phosphate
  modified_base 13: mod_base = OTHER; note = uridine-3'-phosphate
  modified_base 14: mod_base = OTHER; note = adenosine-3'-phosphate
  modified_base 15: mod_base = OTHER; note = adenosine-3'-phosphate
  modified_base 16: mod_base = OTHER; note = adenosine-3'-phosphate
  modified_base 17: mod_base = OTHER; note = uridine-3'-phosphate
  modified_base 18: mod_base = OTHER; note = adenosine-3'-phosphate
  modified_base 19: mod_base = OTHER; note = uridine-3'-phosphate
  misc_feature 1..19: note = RNA
  misc_feature 20..21: note = DNA
agaaatagctgctaaatattt

SEQ ID NO: 1975 - DNA, 21 bp, synthetic construct
  source 1..21: mol_type = other DNA
  modified_base 1: mod_base = OTHER; note = guanosine-3'-phosphate
  modified_base 2: mod_base = OTHER; note = cytidine-3'-phosphate
  modified_base 3: mod_base = OTHER; note = uridine-3'-phosphate
  modified_base 4: mod_base = OTHER; note = guanosine-3'-phosphate
  modified_base 5: mod_base = OTHER; note = cytidine-3'-phosphate
  modified_base 6: mod_base = OTHER; note = uridine-3'-phosphate
  modified_base 7: mod_base = OTHER; note = adenosine-3'-phosphate
  modified_base 8: mod_base = OTHER; note = adenosine-3'-phosphate
  modified_base 9: mod_base = OTHER; note = adenosine-3'-phosphate
  modified_base 10: mod_base = OTHER; note = uridine-3'-phosphate
  modified_base 11: mod_base = OTHER; note = adenosine-3'-phosphate
  modified_base 12: mod_base = OTHER; note = uridine-3'-phosphate
  modified_base 13: mod_base = OTHER; note = adenosine-3'-phosphate
  modified_base 14: mod_base = OTHER; note = adenosine-3'-phosphate
  modified_base 15: mod_base = OTHER; note = adenosine-3'-phosphate
  modified_base 16: mod_base = OTHER; note = cytidine-3'-phosphate
  modified_base 17: mod_base = OTHER; note = adenosine-3'-phosphate
  modified_base 18: mod_base = OTHER; note = uridine-3'-phosphate
  modified_base 19: mod_base = OTHER; note = uridine-3'-phosphate
  misc_feature 1..19: note = RNA
  misc_feature 20..21: note = DNA
gctgctaaatataaacatttt

SEQ ID NO: 1976 - DNA, 21 bp, synthetic construct
  source 1..21: mol_type = other DNA
  modified_base 1: mod_base = OTHER; note = adenosine-3'-phosphate
  modified_base 2: mod_base = OTHER; note = cytidine-3'-phosphate
  modified_base 3: mod_base = OTHER; note = adenosine-3'-phosphate
  modified_base 4: mod_base = OTHER; note = uridine-3'-phosphate
  modified_base 5: mod_base = OTHER; note = uridine-3'-phosphate
  modified_base 6: mod_base = OTHER; note = cytidine-3'-phosphate
  modified_base 7: mod_base = OTHER; note = adenosine-3'-phosphate
  modified_base 8: mod_base = OTHER; note = guanosine-3'-phosphate
  modified_base 9: mod_base = OTHER; note = uridine-3'-phosphate
  modified_base 10: mod_base = OTHER; note = adenosine-3'-phosphate
  modified_base 11: mod_base = OTHER; note = guanosine-3'-phosphate
  modified_base 12: mod_base = OTHER; note = uridine-3'-phosphate
  modified_base 13: mod_base = OTHER; note = guanosine-3'-phosphate
  modified_base 14: mod_base = OTHER; note = adenosine-3'-phosphate
  modified_base 15: mod_base = OTHER; note = adenosine-3'-phosphate
  modified_base 16: mod_base = OTHER; note = guanosine-3'-phosphate
  modified_base 17: mod_base = OTHER; note = adenosine-3'-phosphate
  modified_base 18: mod_base = OTHER; note = adenosine-3'-phosphate
  modified_base 19: mod_base = OTHER; note = adenosine-3'-phosphate
  misc_feature 1..19: note = RNA
  misc_feature 20..21: note = DNA
acattcagtagtgaagaaatt

SEQ ID NO: 1977 - DNA, 21 bp, synthetic construct
  source 1..21: mol_type = other DNA
  modified_base 1: mod_base = OTHER; note = guanosine-3'-phosphate
  modified_base 2: mod_base = OTHER; note = uridine-3'-phosphate
  modified_base 3: mod_base = OTHER; note = adenosine-3'-phosphate
  modified_base 4: mod_base = OTHER; note = guanosine-3'-phosphate
  modified_base 5: mod_base = OTHER; note = uridine-3'-phosphate
  modified_base 6: mod_base = OTHER; note = guanosine-3'-phosphate
  modified_base 7: mod_base = OTHER; note = adenosine-3'-phosphate
  modified_base 8: mod_base = OTHER; note = adenosine-3'-phosphate
  modified_base 9: mod_base = OTHER; note = guanosine-3'-phosphate
  modified_base 10: mod_base = OTHER; note = adenosine-3'-phosphate
  modified_base 11: mod_base = OTHER; note = adenosine-3'-phosphate
  modified_base 12: mod_base = OTHER; note = adenosine-3'-phosphate
  modified_base 13: mod_base = OTHER; note = uridine-3'-phosphate
  modified_base 14: mod_base = OTHER; note = guanosine-3'-phosphate
  modified_base 15: mod_base = OTHER; note = uridine-3'-phosphate
  modified_base 16: mod_base = OTHER; note = uridine-3'-phosphate
  modified_base 17: mod_base = OTHER; note = guanosine-3'-phosphate
  modified_base 18: mod_base = OTHER; note = uridine-3'-phosphate
  modified_base 19: mod_base = OTHER; note = uridine-3'-phosphate
  misc_feature 1..19: note = RNA
  misc_feature 20..21: note = DNA
gtagtgaagaaatgttgtttt

SEQ ID NO: 1978 - DNA, 21 bp, synthetic construct
  source 1..21: mol_type = other DNA
  modified_base 1: mod_base = OTHER; note = adenosine-3'-phosphate
  modified_base 2: mod_base = OTHER; note = adenosine-3'-phosphate
  modified_base 3: mod_base = OTHER; note = adenosine-3'-phosphate
  modified_base 4: mod_base = OTHER; note = uridine-3'-phosphate
  modified_base 5: mod_base = OTHER; note = guanosine-3'-phosphate
  modified_base 6: mod_base = OTHER; note = uridine-3'-phosphate
  modified_base 7: mod_base = OTHER; note = uridine-3'-phosphate
  modified_base 8: mod_base = OTHER; note = guanosine-3'-phosphate
  modified_base 9: mod_base = OTHER; note = uridine-3'-phosphate
  modified_base 10: mod_base = OTHER; note = uridine-3'-phosphate
  modified_base 11: mod_base = OTHER; note = adenosine-3'-phosphate
  modified_base 12: mod_base = OTHER; note = cytidine-3'-phosphate
  modified_base 13: mod_base = OTHER; note = guanosine-3'-phosphate
  modified_base 14: mod_base = OTHER; note = adenosine-3'-phosphate
  modified_base 15: mod_base = OTHER; note = uridine-3'-phosphate
  modified_base 16: mod_base = OTHER; note = guanosine-3'-phosphate
  modified_base 17: mod_base = OTHER; note = guanosine-3'-phosphate
  modified_base 18: mod_base = OTHER; note = adenosine-3'-phosphate
  modified_base 19: mod_base = OTHER; note = guanosine-3'-phosphate
  misc_feature 1..19: note = RNA
  misc_feature 20..21: note = DNA
aaatgttgttacgatggagtt

SEQ ID NO: 1979 - DNA, 21 bp, synthetic construct
  source 1..21: mol_type = other DNA
  modified_base 1: mod_base = OTHER; note = cytidine-3'-phosphate
  modified_base 2: mod_base = OTHER; note = guanosine-3'-phosphate
  modified_base 3: mod_base = OTHER; note = adenosine-3'-phosphate
  modified_base 4: mod_base = OTHER; note = uridine-3'-phosphate
  modified_base 5: mod_base = OTHER; note = guanosine-3'-phosphate
  modified_base 6: mod_base = OTHER; note = guanosine-3'-phosphate
  modified_base 7: mod_base = OTHER; note = adenosine-3'-phosphate
  modified_base 8: mod_base = OTHER; note = guanosine-3'-phosphate
  modified_base 9: mod_base = OTHER; note = cytidine-3'-phosphate
  modified_base 10: mod_base = OTHER; note = cytidine-3'-phosphate
  modified_base 11: mod_base = OTHER; note = uridine-3'-phosphate
  modified_base 12: mod_base = OTHER; note = guanosine-3'-phosphate
  modified_base 13: mod_base = OTHER; note = cytidine-3'-phosphate
  modified_base 14: mod_base = OTHER; note = guanosine-3'-phosphate
  modified_base 15: mod_base = OTHER; note = uridine-3'-phosphate
  modified_base 16: mod_base = OTHER; note = uridine-3'-phosphate
  modified_base 17: mod_base = OTHER; note = adenosine-3'-phosphate
  modified_base 18: mod_base = OTHER; note = adenosine-3'-phosphate
  modified_base 19: mod_base = OTHER; note = uridine-3'-phosphate
  misc_feature 1..19: note = RNA
  misc_feature 20..21: note = DNA
cgatggagcctgcgttaattt

SEQ ID NO: 1980 - DNA, 21 bp, synthetic construct
  source 1..21: mol_type = other DNA
  modified_base 1: mod_base = OTHER; note = cytidine-3'-phosphate
  modified_base 2: mod_base = OTHER; note = guanosine-3'-phosphate
  modified_base 3: mod_base = OTHER; note = uridine-3'-phosphate
  modified_base 4: mod_base = OTHER; note = uridine-3'-phosphate
  modified_base 5: mod_base = OTHER; note = adenosine-3'-phosphate
  modified_base 6: mod_base = OTHER; note = adenosine-3'-phosphate
  modified_base 7: mod_base = OTHER; note = uridine-3'-phosphate
  modified_base 8: mod_base = OTHER; note = adenosine-3'-phosphate
  modified_base 9: mod_base = OTHER; note = adenosine-3'-phosphate
  modified_base 10: mod_base = OTHER; note = uridine-3'-phosphate
  modified_base 11: mod_base = OTHER; note = guanosine-3'-phosphate
  modified_base 12: mod_base = OTHER; note = adenosine-3'-phosphate
  modified_base 13: mod_base = OTHER; note = uridine-3'-phosphate
  modified_base 14: mod_base = OTHER; note = guanosine-3'-phosphate
  modified_base 15: mod_base = OTHER; note = adenosine-3'-phosphate
  modified_base 16: mod_base = OTHER; note = adenosine-3'-phosphate
  modified_base 17: mod_base = OTHER; note = adenosine-3'-phosphate
  modified_base 18: mod_base = OTHER; note = cytidine-3'-phosphate
  modified_base 19: mod_base = OTHER; note = cytidine-3'-phosphate
  misc_feature 1..19: note = RNA
  misc_feature 20..21: note = DNA
cgttaataatgatgaaacctt

SEQ ID NO: 1981 - DNA, 21 bp, synthetic construct
  source 1..21: mol_type = other DNA
  modified_base 1: mod_base = OTHER; note = adenosine-3'-phosphate
  modified_base 2: mod_base = OTHER; note = uridine-3'-phosphate
  modified_base 3: mod_base = OTHER; note = guanosine-3'-phosphate
  modified_base 4: mod_base = OTHER; note = adenosine-3'-phosphate
  modified_base 5: mod_base = OTHER; note = uridine-3'-phosphate
  modified_base 6: mod_base = OTHER; note = guanosine-3'-phosphate
  modified_base 7: mod_base = OTHER; note = adenosine-3'-phosphate
  modified_base 8: mod_base = OTHER; note = adenosine-3'-phosphate
  modified_base 9: mod_base = OTHER; note = adenosine-3'-phosphate
  modified_base 10: mod_base = OTHER; note = cytidine-3'-phosphate
  modified_base 11: mod_base = OTHER; note = cytidine-3'-phosphate
  modified_base 12: mod_base = OTHER; note = uridine-3'-phosphate
  modified_base 13: mod_base = OTHER; note = guanosine-3'-phosphate
  modified_base 14: mod_base = OTHER; note = uridine-3'-phosphate
  modified_base 15: mod_base = OTHER; note = guanosine-3'-phosphate
  modified_base 16: mod_base = OTHER; note = adenosine-3'-phosphate
  modified_base 17: mod_base = OTHER; note = guanosine-3'-phosphate
  modified_base 18: mod_base = OTHER; note = cytidine-3'-phosphate
  modified_base 19: mod_base = OTHER; note = adenosine-3'-phosphate
  misc_feature 1..19: note = RNA
  misc_feature 20..21: note = DNA
atgatgaaacctgtgagcatt

SEQ ID NO: 1982 - DNA, 21 bp, synthetic construct
  source 1..21: mol_type = other DNA
  modified_base 1: mod_base = OTHER; note = cytidine-3'-phosphate
  modified_base 2: mod_base = OTHER; note = uridine-3'-phosphate
  modified_base 3: mod_base = OTHER; note = guanosine-3'-phosphate
  modified_base 4: mod_base = OTHER; note = uridine-3'-phosphate
  modified_base 5: mod_base = OTHER; note = guanosine-3'-phosphate
  modified_base 6: mod_base = OTHER; note = adenosine-3'-phosphate
  modified_base 7: mod_base = OTHER; note = guanosine-3'-phosphate
  modified_base 8: mod_base = OTHER; note = cytidine-3'-phosphate
  modified_base 9: mod_base = OTHER; note = adenosine-3'-phosphate
  modified_base 10: mod_base = OTHER; note = guanosine-3'-phosphate
  modified_base 11: mod_base = OTHER; note = cytidine-3'-phosphate
  modified_base 12: mod_base = OTHER; note = guanosine-3'-phosphate
  modified_base 13: mod_base = OTHER; note = adenosine-3'-phosphate
  modified_base 14: mod_base = OTHER; note = guanosine-3'-phosphate
  modified_base 15: mod_base = OTHER; note = cytidine-3'-phosphate
  modified_base 16: mod_base = OTHER; note = uridine-3'-phosphate
  modified_base 17: mod_base = OTHER; note = guanosine-3'-phosphate
  modified_base 18: mod_base = OTHER; note = cytidine-3'-phosphate
  modified_base 19: mod_base = OTHER; note = adenosine-3'-phosphate
  misc_feature 1..19: note = RNA
  misc_feature 20..21: note = DNA
ctgtgagcagcgagctgcatt

SEQ ID NO: 1983 - DNA, 21 bp, synthetic construct
  source 1..21: mol_type = other DNA
  modified_base 1: mod_base = OTHER; note = cytidine-3'-phosphate
  modified_base 2: mod_base = OTHER; note = guanosine-3'-phosphate
  modified_base 3: mod_base = OTHER; note = adenosine-3'-phosphate
  modified_base 4: mod_base = OTHER; note = guanosine-3'-phosphate
  modified_base 5: mod_base = OTHER; note = cytidine-3'-phosphate
  modified_base 6: mod_base = OTHER; note = uridine-3'-phosphate
  modified_base 7: mod_base = OTHER; note = guanosine-3'-phosphate
  modified_base 8: mod_base = OTHER; note = cytidine-3'-phosphate
  modified_base 9: mod_base = OTHER; note = adenosine-3'-phosphate
  modified_base 10: mod_base = OTHER; note = cytidine-3'-phosphate
  modified_base 11: mod_base = OTHER; note = guanosine-3'-phosphate
  modified_base 12: mod_base = OTHER; note = guanosine-3'-phosphate
  modified_base 13: mod_base = OTHER; note = adenosine-3'-phosphate
  modified_base 14: mod_base = OTHER; note = uridine-3'-phosphate
  modified_base 15: mod_base = OTHER; note = uridine-3'-phosphate
  modified_base 16: mod_base = OTHER; note = adenosine-3'-phosphate
  modified_base 17: mod_base = OTHER; note = guanosine-3'-phosphate
  modified_base 18: mod_base = OTHER; note = uridine-3'-phosphate
  modified_base 19: mod_base = OTHER; note = uridine-3'-phosphate
  misc_feature 1..19: note = RNA
  misc_feature 20..21: note = DNA
cgagctgcacggattagtttt

SEQ ID NO: 1984 - DNA, 21 bp, synthetic construct
  source 1..21: mol_type = other DNA
  modified_base 1: mod_base = OTHER; note = guanosine-3'-phosphate
  modified_base 2: mod_base = OTHER; note = guanosine-3'-phosphate
  modified_base 3: mod_base = OTHER; note = adenosine-3'-phosphate
  modified_base 4: mod_base = OTHER; note = uridine-3'-phosphate
  modified_base 5: mod_base = OTHER; note = uridine-3'-phosphate
  modified_base 6: mod_base = OTHER; note = adenosine-3'-phosphate
  modified_base 7: mod_base = OTHER; note = guanosine-3'-phosphate
  modified_base 8: mod_base = OTHER; note = uridine-3'-phosphate
  modified_base 9: mod_base = OTHER; note = uridine-3'-phosphate
  modified_base 10: mod_base = OTHER; note = uridine-3'-phosphate
  modified_base 11: mod_base = OTHER; note = adenosine-3'-phosphate
  modified_base 12: mod_base = OTHER; note = guanosine-3'-phosphate
  modified_base 13: mod_base = OTHER; note = guanosine-3'-phosphate
  modified_base 14: mod_base = OTHER; note = guanosine-3'-phosphate
  modified_base 15: mod_base = OTHER; note = cytidine-3'-phosphate
  modified_base 16: mod_base = OTHER; note = cytidine-3'-phosphate
  modified_base 17: mod_base = OTHER; note = adenosine-3'-phosphate
  modified_base 18: mod_base = OTHER; note = adenosine-3'-phosphate
  modified_base 19: mod_base = OTHER; note = guanosine-3'-phosphate
  misc_feature 1..19: note = RNA
  misc_feature 20..21: note = DNA
ggattagtttagggccaagtt

SEQ ID NO: 1985 - DNA, 21 bp, synthetic construct
  source 1..21: mol_type = other DNA
  modified_base 1: mod_base = OTHER; note = guanosine-3'-phosphate
  modified_base 2: mod_base = OTHER; note = guanosine-3'-phosphate
  modified_base 3: mod_base = OTHER; note = guanosine-3'-phosphate
  modified_base 4: mod_base = OTHER; note = cytidine-3'-phosphate
  modified_base 5: mod_base = OTHER; note = cytidine-3'-phosphate
  modified_base 6: mod_base = OTHER; note = adenosine-3'-phosphate
  modified_base 7: mod_base = OTHER; note = adenosine-3'-phosphate
  modified_base 8: mod_base = OTHER; note = guanosine-3'-phosphate
  modified_base 9: mod_base = OTHER; note = adenosine-3'-phosphate
  modified_base 10: mod_base = OTHER; note = uridine-3'-phosphate
  modified_base 11: mod_base = OTHER; note = guanosine-3'-phosphate
  modified_base 12: mod_base = OTHER; note = cytidine-3'-phosphate
  modified_base 13: mod_base = OTHER; note = adenosine-3'-phosphate
  modified_base 14: mod_base = OTHER; note = uridine-3'-phosphate
  modified_base 15: mod_base = OTHER; note = cytidine-3'-phosphate
  modified_base 16: mod_base = OTHER; note = adenosine-3'-phosphate
  modified_base 17: mod_base = OTHER; note = adenosine-3'-phosphate
  modified_base 18: mod_base = OTHER; note = adenosine-3'-phosphate
  modified_base 19: mod_base = OTHER; note = guanosine-3'-phosphate
  misc_feature 1..19: note = RNA
  misc_feature 20..21: note = DNA
gggccaagatgcatcaaagtt

SEQ ID NO: 1986 - DNA, 21 bp, synthetic construct
  source 1..21: mol_type = other DNA
  modified_base 1: mod_base = OTHER; note = cytidine-3'-phosphate
  modified_base 2: mod_base = OTHER; note = adenosine-3'-phosphate
  modified_base 3: mod_base = OTHER; note = uridine-3'-phosphate
  modified_base 4: mod_base = OTHER; note = cytidine-3'-phosphate
  modified_base 5: mod_base = OTHER; note = adenosine-3'-phosphate
  modified_base 6: mod_base = OTHER; note = adenosine-3'-phosphate
  modified_base 7: mod_base = OTHER; note = adenosine-3'-phosphate
  modified_base 8: mod_base = OTHER; note = guanosine-3'-phosphate
  modified_base 9: mod_base = OTHER; note = cytidine-3'-phosphate
  modified_base 10: mod_base = OTHER; note = uridine-3'-phosphate
  modified_base 11: mod_base = OTHER; note = uridine-3'-phosphate
  modified_base 12: mod_base = OTHER; note = uridine-3'-phosphate
  modified_base 13: mod_base = OTHER; note = cytidine-3'-phosphate
  modified_base 14: mod_base = OTHER; note = adenosine-3'-phosphate
  modified_base 15: mod_base = OTHER; note = cytidine-3'-phosphate
  modified_base 16: mod_base = OTHER; note = uridine-3'-phosphate
  modified_base 17: mod_base = OTHER; note = guanosine-3'-phosphate
  modified_base 18: mod_base = OTHER; note = adenosine-3'-phosphate
  modified_base 19: mod_base = OTHER; note = adenosine-3'-phosphate
  misc_feature 1..19: note = RNA
  misc_feature 20..21: note = DNA
catcaaagctttcactgaatt

SEQ ID NO: 1987 - DNA, 21 bp, synthetic construct
  source 1..21: mol_type = other DNA
  modified_base 1: mod_base = OTHER; note = guanosine-3'-phosphate
  modified_base 2: mod_base = OTHER; note = cytidine-3'-phosphate
  modified_base 3: mod_base = OTHER; note = uridine-3'-phosphate
  modified_base 4: mod_base = OTHER; note = uridine-3'-phosphate
  modified_base 5: mod_base = OTHER; note = uridine-3'-phosphate
  modified_base 6: mod_base = OTHER; note = cytidine-3'-phosphate
  modified_base 7: mod_base = OTHER; note = adenosine-3'-phosphate
  modified_base 8: mod_base = OTHER; note = cytidine-3'-phosphate
  modified_base 9: mod_base = OTHER; note = uridine-3'-phosphate
  modified_base 10: mod_base = OTHER; note = guanosine-3'-phosphate
  modified_base 11: mod_base = OTHER; note = adenosine-3'-phosphate
  modified_base 12: mod_base = OTHER; note = adenosine-3'-phosphate
  modified_base 13: mod_base = OTHER; note = uridine-3'-phosphate
  modified_base 14: mod_base = OTHER; note = guanosine-3'-phosphate
  modified_base 15: mod_base = OTHER; note = uridine-3'-phosphate
  modified_base 16: mod_base = OTHER; note = uridine-3'-phosphate
  modified_base 17: mod_base = OTHER; note = guanosine-3'-phosphate
  modified_base 18: mod_base = OTHER; note = uridine-3'-phosphate
  modified_base 19: mod_base = OTHER; note = guanosine-3'-phosphate
  misc_feature 1..19: note = RNA
  misc_feature 20..21: note = DNA
gctttcactgaatgttgtgtt

SEQ ID NO: 1988 - DNA, 21 bp, synthetic construct
  source 1..21: mol_type = other DNA
  modified_base 1: mod_base = OTHER; note = adenosine-3'-phosphate
  modified_base 2: mod_base = OTHER; note = adenosine-3'-phosphate
  modified_base 3: mod_base = OTHER; note = uridine-3'-phosphate
  modified_base 4: mod_base = OTHER; note = guanosine-3'-phosphate
  modified_base 5: mod_base = OTHER; note = uridine-3'-phosphate
  modified_base 6: mod_base = OTHER; note = uridine-3'-phosphate
  modified_base 7: mod_base = OTHER; note = guanosine-3'-phosphate
  modified_base 8: mod_base = OTHER; note = uridine-3'-phosphate
  modified_base 9: mod_base = OTHER; note = guanosine-3'-phosphate
  modified_base 10: mod_base = OTHER; note = uridine-3'-phosphate
  modified_base 11: mod_base = OTHER; note = cytidine-3'-phosphate
  modified_base 12: mod_base = OTHER; note = guanosine-3'-phosphate
  modified_base 13: mod_base = OTHER; note = uridine-3'-phosphate
  modified_base 14: mod_base = OTHER; note = cytidine-3'-phosphate
  modified_base 15: mod_base = OTHER; note = guanosine-3'-phosphate
  modified_base 16: mod_base = OTHER; note = cytidine-3'-phosphate
  modified_base 17: mod_base = OTHER; note = adenosine-3'-phosphate
  modified_base 18: mod_base = OTHER; note = adenosine-3'-phosphate
  modified_base 19: mod_base = OTHER; note = guanosine-3'-phosphate
  misc_feature 1..19: note = RNA
  misc_feature 20..21: note = DNA
aatgttgtgtcgtcgcaagtt

SEQ ID NO: 1989 - DNA, 21 bp, synthetic construct
  source 1..21: mol_type = other DNA
  modified_base 1: mod_base = OTHER; note = cytidine-3'-phosphate
  modified_base 2: mod_base = OTHER; note = guanosine-3'-phosphate
  modified_base 3: mod_base = OTHER; note = uridine-3'-phosphate
  modified_base 4: mod_base = OTHER; note = cytidine-3'-phosphate
  modified_base 5: mod_base = OTHER; note = guanosine-3'-phosphate
  modified_base 6: mod_base = OTHER; note = cytidine-3'-phosphate
  modified_base 7: mod_base = OTHER; note = adenosine-3'-phosphate
  modified_base 8: mod_base = OTHER; note = adenosine-3'-phosphate
  modified_base 9: mod_base = OTHER; note = guanosine-3'-phosphate
  modified_base 10: mod_base = OTHER; note = cytidine-3'-phosphate
  modified_base 11: mod_base = OTHER; note = cytidine-3'-phosphate
  modified_base 12: mod_base = OTHER; note = adenosine-3'-phosphate
  modified_base 13: mod_base = OTHER; note = guanosine-3'-phosphate
  modified_base 14: mod_base = OTHER; note = cytidine-3'-phosphate
  modified_base 15: mod_base = OTHER; note = uridine-3'-phosphate
  modified_base 16: mod_base = OTHER; note = cytidine-3'-phosphate
  modified_base 17: mod_base = OTHER; note = cytidine-3'-phosphate
  modified_base 18: mod_base = OTHER; note = guanosine-3'-phosphate
  modified_base 19: mod_base = OTHER; note = uridine-3'-phosphate
  misc_feature 1..19: note = RNA
  misc_feature 20..21: note = DNA
cgtcgcaagccagctccgttt

SEQ ID NO: 1990 - DNA, 21 bp, synthetic construct
  source 1..21: mol_type = other DNA
  modified_base 1: mod_base = OTHER; note = guanosine-3'-phosphate
  modified_base 2: mod_base = OTHER; note = cytidine-3'-phosphate
  modified_base 3: mod_base = OTHER; note = uridine-3'-phosphate
  modified_base 4: mod_base = OTHER; note = cytidine-3'-phosphate
  modified_base 5: mod_base = OTHER; note = cytidine-3'-phosphate
  modified_base 6: mod_base = OTHER; note = guanosine-3'-phosphate
  modified_base 7: mod_base = OTHER; note = uridine-3'-phosphate
  modified_base 8: mod_base = OTHER; note = guanosine-3'-phosphate
  modified_base 9: mod_base = OTHER; note = cytidine-3'-phosphate
  modified_base 10: mod_base = OTHER; note = uridine-3'-phosphate
  modified_base 11: mod_base = OTHER; note = adenosine-3'-phosphate
  modified_base 12: mod_base = OTHER; note = adenosine-3'-phosphate
  modified_base 13: mod_base = OTHER; note = uridine-3'-phosphate
  modified_base 14: mod_base = OTHER; note = adenosine-3'-phosphate
  modified_base 15: mod_base = OTHER; note = uridine-3'-phosphate
  modified_base 16: mod_base = OTHER; note = cytidine-3'-phosphate
  modified_base 17: mod_base = OTHER; note = uridine-3'-phosphate
  modified_base 18: mod_base = OTHER; note = cytidine-3'-phosphate
  modified_base 19: mod_base = OTHER; note = uridine-3'-phosphate
  misc_feature 1..19: note = RNA
  misc_feature 20..21: note = DNA
gctccgtgctaatatctcttt

SEQ ID NO: 1991 - DNA, 21 bp, synthetic construct
  source 1..21: mol_type = other DNA
  modified_base 1: mod_base = OTHER; note = cytidine-3'-phosphate
  modified_base 2: mod_base = OTHER; note = uridine-3'-phosphate
  modified_base 3: mod_base = OTHER; note = adenosine-3'-phosphate
  modified_base 4: mod_base = OTHER; note = adenosine-3'-phosphate
  modified_base 5: mod_base = OTHER; note = uridine-3'-phosphate
  modified_base 6: mod_base = OTHER; note = adenosine-3'-phosphate
  modified_base 7: mod_base = OTHER; note = uridine-3'-phosphate
  modified_base 8: mod_base = OTHER; note = cytidine-3'-phosphate
  modified_base 9: mod_base = OTHER; note = uridine-3'-phosphate
  modified_base 10: mod_base = OTHER; note = cytidine-3'-phosphate
  modified_base 11: mod_base = OTHER; note = uridine-3'-phosphate
  modified_base 12: mod_base = OTHER; note = cytidine-3'-phosphate
  modified_base 13: mod_base = OTHER; note = adenosine-3'-phosphate
  modified_base 14: mod_base = OTHER; note = uridine-3'-phosphate
  modified_base 15: mod_base = OTHER; note = adenosine-3'-phosphate
  modified_base 16: mod_base = OTHER; note = adenosine-3'-phosphate
  modified_base 17: mod_base = OTHER; note = adenosine-3'-phosphate
  modified_base 18: mod_base = OTHER; note = guanosine-3'-phosphate
  modified_base 19: mod_base = OTHER; note = adenosine-3'-phosphate
  misc_feature 1..19: note = RNA
  misc_feature 20..21: note = DNA
ctaatatctctcataaagatt

SEQ ID NO: 1992 - DNA, 21 bp, synthetic construct
  source 1..21: mol_type = other DNA
  modified_base 1: mod_base = OTHER; note = adenosine-3'-phosphate
  modified_base 2: mod_base = OTHER; note = adenosine-3'-phosphate
  modified_base 3: mod_base = OTHER; note = adenosine-3'-phosphate
  modified_base 4: mod_base = OTHER; note = guanosine-3'-phosphate
  modified_base 5: mod_base = OTHER; note = adenosine-3'-phosphate
  modified_base 6: mod_base = OTHER; note = cytidine-3'-phosphate
  modified_base 7: mod_base = OTHER; note = adenosine-3'-phosphate
  modified_base 8: mod_base = OTHER; note = uridine-3'-phosphate
  modified_base 9: mod_base = OTHER; note = guanosine-3'-phosphate
  modified_base 10: mod_base = OTHER; note = cytidine-3'-phosphate
  modified_base 11: mod_base = OTHER; note = adenosine-3'-phosphate
  modified_base 12: mod_base = OTHER; note = adenosine-3'-phosphate
  modified_base 13: mod_base = OTHER; note = uridine-3'-phosphate
  modified_base 14: mod_base = OTHER; note = uridine-3'-phosphate
  modified_base 15: mod_base = OTHER; note = guanosine-3'-phosphate
  modified_base 16: mod_base = OTHER; note = guanosine-3'-phosphate
  modified_base 17: mod_base = OTHER; note = guanosine-3'-phosphate
  modified_base 18: mod_base = OTHER; note = adenosine-3'-phosphate
  modified_base 19: mod_base = OTHER; note = adenosine-3'-phosphate
  misc_feature 1..19: note = RNA
  misc_feature 20..21: note = DNA
aaagacatgcaattgggaatt

SEQ ID NO: 1993 - DNA, 21 bp, synthetic construct
  source 1..21: mol_type = other DNA
  modified_base 1: mod_base = OTHER; note = cytidine-3'-phosphate
  modified_base 2: mod_base = OTHER; note = adenosine-3'-phosphate
  modified_base 3: mod_base = OTHER; note = adenosine-3'-phosphate
  modified_base 4: mod_base = OTHER; note = uridine-3'-phosphate
  modified_base 5: mod_base = OTHER; note = uridine-3'-phosphate
  modified_base 6: mod_base = OTHER; note = guanosine-3'-phosphate
  modified_base 7: mod_base = OTHER; note = guanosine-3'-phosphate
  modified_base 8: mod_base = OTHER; note = guanosine-3'-phosphate
  modified_base 9: mod_base = OTHER; note = adenosine-3'-phosphate
  modified_base 10: mod_base = OTHER; note = adenosine-3'-phosphate
  modified_base 11: mod_base = OTHER; note = guanosine-3'-phosphate
  modified_base 12: mod_base = OTHER; note = guanosine-3'-phosphate
  modified_base 13: mod_base = OTHER; note = cytidine-3'-phosphate
  modified_base 14: mod_base = OTHER; note = uridine-3'-phosphate
  modified_base 15: mod_base = OTHER; note = adenosine-3'-phosphate
  modified_base 16: mod_base = OTHER; note = cytidine-3'-phosphate
  modified_base 17: mod_base = OTHER; note = adenosine-3'-phosphate
  modified_base 18: mod_base = OTHER; note = cytidine-3'-phosphate
  modified_base 19: mod_base = OTHER; note = adenosine-3'-phosphate
  misc_feature 1..19: note = RNA
  misc_feature 20..21: note = DNA
caattgggaaggctacacatt

SEQ ID NO: 1994 - DNA, 21 bp, synthetic construct
  source 1..21: mol_type = other DNA
  modified_base 1: mod_base = OTHER; note = guanosine-3'-phosphate
  modified_base 2: mod_base = OTHER; note = cytidine-3'-phosphate
  modified_base 3: mod_base = OTHER; note = uridine-3'-phosphate
  modified_base 4: mod_base = OTHER; note = adenosine-3'-phosphate
  modified_base 5: mod_base = OTHER; note = cytidine-3'-phosphate
  modified_base 6: mod_base = OTHER; note = adenosine-3'-phosphate
  modified_base 7: mod_base = OTHER; note = cytidine-3'-phosphate
  modified_base 8: mod_base = OTHER; note = adenosine-3'-phosphate
  modified_base 9: mod_base = OTHER; note = uridine-3'-phosphate
  modified_base 10: mod_base = OTHER; note = guanosine-3'-phosphate
  modified_base 11: mod_base = OTHER; note = adenosine-3'-phosphate
  modified_base 12: mod_base = OTHER; note = adenosine-3'-phosphate
  modified_base 13: mod_base = OTHER; note = guanosine-3'-phosphate
  modified_base 14: mod_base = OTHER; note = adenosine-3'-phosphate
  modified_base 15: mod_base = OTHER; note = cytidine-3'-phosphate
  modified_base 16: mod_base = OTHER; note = cytidine-3'-phosphate
  modified_base 17: mod_base = OTHER; note = cytidine-3'-phosphate
  modified_base 18: mod_base = OTHER; note = uridine-3'-phosphate
  modified_base 19: mod_base = OTHER; note = guanosine-3'-phosphate
  misc_feature 1..19: note = RNA
  misc_feature 20..21: note = DNA
gctacacatgaagaccctgtt

SEQ ID NO: 1995 - DNA, 21 bp, synthetic construct
  source 1..21: mol_type = other DNA
  modified_base 1: mod_base = OTHER; note = cytidine-3'-phosphate
  modified_base 2: mod_base = OTHER; note = adenosine-3'-phosphate
  modified_base 3: mod_base = OTHER; note = uridine-3'-phosphate
  modified_base 4: mod_base = OTHER; note = guanosine-3'-phosphate
  modified_base 5: mod_base = OTHER; note = adenosine-3'-phosphate
  modified_base 6: mod_base = OTHER; note = adenosine-3'-phosphate
  modified_base 7: mod_base = OTHER; note = guanosine-3'-phosphate
  modified_base 8: mod_base = OTHER; note = adenosine-3'-phosphate
  modified_base 9: mod_base = OTHER; note = cytidine-3'-phosphate
  modified_base 10: mod_base = OTHER; note = cytidine-3'-phosphate
  modified_base 11: mod_base = OTHER; note = cytidine-3'-phosphate
  modified_base 12: mod_base = OTHER; note = uridine-3'-phosphate
  modified_base 13: mod_base = OTHER; note = guanosine-3'-phosphate
  modified_base 14: mod_base = OTHER; note = uridine-3'-phosphate
  modified_base 15: mod_base = OTHER; note = uridine-3'-phosphate
  modified_base 16: mod_base = OTHER; note = adenosine-3'-phosphate
  modified_base 17: mod_base = OTHER; note = cytidine-3'-phosphate
  modified_base 18: mod_base = OTHER; note = cytidine-3'-phosphate
  modified_base 19: mod_base = OTHER; note = adenosine-3'-phosphate
  misc_feature 1..19: note = RNA
  misc_feature 20..21: note = DNA
catgaagaccctgttaccatt

SEQ ID NO: 1996 - DNA, 21 bp, synthetic construct
  source 1..21: mol_type = other DNA
  modified_base 1: mod_base = OTHER; note = uridine-3'-phosphate
  modified_base 2: mod_base = OTHER; note = adenosine-3'-phosphate
  modified_base 3: mod_base = OTHER; note = cytidine-3'-phosphate
  modified_base 4: mod_base = OTHER; note = cytidine-3'-phosphate
  modified_base 5: mod_base = OTHER; note = adenosine-3'-phosphate
  modified_base 6: mod_base = OTHER; note = guanosine-3'-phosphate
  modified_base 7: mod_base = OTHER; note = uridine-3'-phosphate
  modified_base 8: mod_base = OTHER; note = adenosine-3'-phosphate
  modified_base 9: mod_base = OTHER; note = adenosine-3'-phosphate
  modified_base 10: mod_base = OTHER; note = guanosine-3'-phosphate
  modified_base 11: mod_base = OTHER; note = cytidine-3'-phosphate
  modified_base 12: mod_base = OTHER; note = adenosine-3'-phosphate
  modified_base 13: mod_base = OTHER; note = adenosine-3'-phosphate
  modified_base 14: mod_base = OTHER; note = guanosine-3'-phosphate
  modified_base 15: mod_base = OTHER; note = cytidine-3'-phosphate
  modified_base 16: mod_base = OTHER; note = cytidine-3'-phosphate
  modified_base 17: mod_base = OTHER; note = adenosine-3'-phosphate
  modified_base 18: mod_base = OTHER; note = guanosine-3'-phosphate
  modified_base 19: mod_base = OTHER; note = adenosine-3'-phosphate
  misc_feature 1..19: note = RNA
  misc_feature 20..21: note = DNA
taccagtaagcaagccagatt

SEQ ID NO: 1997 - DNA, 21 bp, synthetic construct
  source 1..21: mol_type = other DNA
  modified_base 1: mod_base = OTHER; note = adenosine-3'-phosphate
  modified_base 2: mod_base = OTHER; note = guanosine-3'-phosphate
  modified_base 3: mod_base = OTHER; note = cytidine-3'-phosphate
  modified_base 4: mod_base = OTHER; note = adenosine-3'-phosphate
  modified_base 5: mod_base = OTHER; note = adenosine-3'-phosphate
  modified_base 6: mod_base = OTHER; note = guanosine-3'-phosphate
  modified_base 7: mod_base = OTHER; note = cytidine-3'-phosphate
  modified_base 8: mod_base = OTHER; note = cytidine-3'-phosphate
  modified_base 9: mod_base = OTHER; note = adenosine-3'-phosphate
  modified_base 10: mod_base = OTHER; note = guanosine-3'-phosphate
  modified_base 11: mod_base = OTHER; note = adenosine-3'-phosphate
  modified_base 12: mod_base = OTHER; note = adenosine-3'-phosphate
  modified_base 13: mod_base = OTHER; note = adenosine-3'-phosphate
  modified_base 14: mod_base = OTHER; note = uridine-3'-phosphate
  modified_base 15: mod_base = OTHER; note = uridine-3'-phosphate
  modified_base 16: mod_base = OTHER; note = cytidine-3'-phosphate
  modified_base 17: mod_base = OTHER; note = guanosine-3'-phosphate
  modified_base 18: mod_base = OTHER; note = guanosine-3'-phosphate
  modified_base 19: mod_base = OTHER; note = adenosine-3'-phosphate
  misc_feature 1..19: note = RNA
  misc_feature 20..21: note = DNA
agcaagccagaaattcggatt

SEQ ID NO: 1998 - DNA, 21 bp, synthetic construct
  source 1..21: mol_type = other DNA
  modified_base 1: mod_base = OTHER; note = adenosine-3'-phosphate
  modified_base 2: mod_base = OTHER; note = guanosine-3'-phosphate
  modified_base 3: mod_base = OTHER; note = adenosine-3'-phosphate
  modified_base 4: mod_base = OTHER; note = adenosine-3'-phosphate
  modified_base 5: mod_base = OTHER; note = adenosine-3'-phosphate
  modified_base 6: mod_base = OTHER; note = uridine-3'-phosphate
  modified_base 7: mod_base = OTHER; note = uridine-3'-phosphate
  modified_base 8: mod_base = OTHER; note = cytidine-3'-phosphate
  modified_base 9: mod_base = OTHER; note = guanosine-3'-phosphate
  modified_base 10: mod_base = OTHER; note = guanosine-3'-phosphate
  modified_base 11: mod_base = OTHER; note = adenosine-3'-phosphate
  modified_base 12: mod_base = OTHER; note = guanosine-3'-phosphate
  modified_base 13: mod_base = OTHER; note = uridine-3'-phosphate
  modified_base 14: mod_base = OTHER; note = uridine-3'-phosphate
  modified_base 15: mod_base = OTHER; note = adenosine-3'-phosphate
  modified_base 16: mod_base = OTHER; note = uridine-3'-phosphate
  modified_base 17: mod_base = OTHER; note = uridine-3'-phosphate
  modified_base 18: mod_base = OTHER; note = uridine-3'-phosphate
  modified_base 19: mod_base = OTHER; note = uridine-3'-phosphate
  misc_feature 1..19: note = RNA
  misc_feature 20..21: note = DNA
agaaattcggagttatttttt

SEQ ID NO: 1999 - DNA, 21 bp, synthetic construct
  source 1..21: mol_type = other DNA
  modified_base 1: mod_base = OTHER; note = adenosine-3'-phosphate
  modified_base 2: mod_base = OTHER; note = guanosine-3'-phosphate
  modified_base 3: mod_base = OTHER; note = uridine-3'-phosphate
  modified_base 4: mod_base = OTHER; note = uridine-3'-phosphate
  modified_base 5: mod_base = OTHER; note = adenosine-3'-phosphate
  modified_base 6: mod_base = OTHER; note = uridine-3'-phosphate
  modified_base 7: mod_base = OTHER; note = uridine-3'-phosphate
  modified_base 8: mod_base = OTHER; note = uridine-3'-phosphate
  modified_base 9: mod_base = OTHER; note = uridine-3'-phosphate
  modified_base 10: mod_base = OTHER; note = cytidine-3'-phosphate
  modified_base 11: mod_base = OTHER; note = cytidine-3'-phosphate
  modified_base 12: mod_base = OTHER; note = adenosine-3'-phosphate
  modified_base 13: mod_base = OTHER; note = guanosine-3'-phosphate
  modified_base 14: mod_base = OTHER; note = adenosine-3'-phosphate
  modified_base 15: mod_base = OTHER; note = adenosine-3'-phosphate
  modified_base 16: mod_base = OTHER; note = adenosine-3'-phosphate
  modified_base 17: mod_base = OTHER; note = guanosine-3'-phosphate
  modified_base 18: mod_base = OTHER; note = cytidine-3'-phosphate
  modified_base 19: mod_base = OTHER; note = uridine-3'-phosphate
  misc_feature 1..19: note = RNA
  misc_feature 20..21: note = DNA
agttattttccagaaagcttt

SEQ ID NO: 2000 - DNA, 21 bp, synthetic construct
  source 1..21: mol_type = other DNA
  modified_base 1: mod_base = OTHER; note = cytidine-3'-phosphate
  modified_base 2: mod_base = OTHER; note = adenosine-3'-phosphate
  modified_base 3: mod_base = OTHER; note = guanosine-3'-phosphate
  modified_base 4: mod_base = OTHER; note = adenosine-3'-phosphate
  modified_base 5: mod_base = OTHER; note = adenosine-3'-phosphate
  modified_base 6: mod_base = OTHER; note = adenosine-3'-phosphate
  modified_base 7: mod_base = OTHER; note = guanosine-3'-phosphate
  modified_base 8: mod_base = OTHER; note = cytidine-3'-phosphate
  modified_base 9: mod_base = OTHER; note = uridine-3'-phosphate
  modified_base 10: mod_base = OTHER; note = guanosine-3'-phosphate
  modified_base 11: mod_base = OTHER; note = guanosine-3'-phosphate
  modified_base 12: mod_base = OTHER; note = uridine-3'-phosphate
  modified_base 13: mod_base = OTHER; note = uridine-3'-phosphate
  modified_base 14: mod_base = OTHER; note = guanosine-3'-phosphate
  modified_base 15: mod_base = OTHER; note = uridine-3'-phosphate
  modified_base 16: mod_base = OTHER; note = guanosine-3'-phosphate
  modified_base 17: mod_base = OTHER; note = guanosine-3'-phosphate
  modified_base 18: mod_base = OTHER; note = guanosine-3'-phosphate
  modified_base 19: mod_base = OTHER; note = adenosine-3'-phosphate
  misc_feature 1..19: note = RNA
  misc_feature 20..21: note = DNA
cagaaagctggttgtgggatt

SEQ ID NO: 2001 - DNA, 21 bp, synthetic construct
  source 1..21: mol_type = other DNA
  modified_base 1: mod_base = OTHER; note = guanosine-3'-phosphate
  modified_base 2: mod_base = OTHER; note = uridine-3'-phosphate
  modified_base 3: mod_base = OTHER; note = guanosine-3'-phosphate
  modified_base 4: mod_base = OTHER; note = guanosine-3'-phosphate
  modified_base 5: mod_base = OTHER; note = guanosine-3'-phosphate
  modified_base 6: mod_base = OTHER; note = adenosine-3'-phosphate
  modified_base 7: mod_base = OTHER; note = adenosine-3'-phosphate
  modified_base 8: mod_base = OTHER; note = guanosine-3'-phosphate
  modified_base 9: mod_base = OTHER; note = uridine-3'-phosphate
  modified_base 10: mod_base = OTHER; note = uridine-3'-phosphate
  modified_base 11: mod_base = OTHER; note = cytidine-3'-phosphate
  modified_base 12: mod_base = OTHER; note = adenosine-3'-phosphate
  modified_base 13: mod_base = OTHER; note = uridine-3'-phosphate
  modified_base 14: mod_base = OTHER; note = cytidine-3'-phosphate
  modified_base 15: mod_base = OTHER; note = uridine-3'-phosphate
  modified_base 16: mod_base = OTHER; note = uridine-3'-phosphate
  modified_base 17: mod_base = OTHER; note = guanosine-3'-phosphate
  modified_base 18: mod_base = OTHER; note = uridine-3'-phosphate
  modified_base 19: mod_base = OTHER; note = uridine-3'-phosphate
  misc_feature 1..19: note = RNA
  misc_feature 20..21: note = DNA
gtgggaagttcatcttgtttt

SEQ ID NO: 2002 - DNA, 21 bp, synthetic construct
  source 1..21: mol_type = other DNA
  modified_base 1: mod_base = OTHER; note = uridine-3'-phosphate
  modified_base 2: mod_base = OTHER; note = cytidine-3'-phosphate
  modified_base 3: mod_base = OTHER; note = adenosine-3'-phosphate
  modified_base 4: mod_base = OTHER; note = uridine-3'-phosphate
  modified_base 5: mod_base = OTHER; note = cytidine-3'-phosphate
  modified_base 6: mod_base = OTHER; note = uridine-3'-phosphate
  modified_base 7: mod_base = OTHER; note = uridine-3'-phosphate
  modified_base 8: mod_base = OTHER; note = guanosine-3'-phosphate
  modified_base 9: mod_base = OTHER; note = uridine-3'-phosphate
  modified_base 10: mod_base = OTHER; note = uridine-3'-phosphate
  modified_base 11: mod_base = OTHER; note = cytidine-3'-phosphate
  modified_base 12: mod_base = OTHER; note = cytidine-3'-phosphate
  modified_base 13: mod_base = OTHER; note = cytidine-3'-phosphate
  modified_base 14: mod_base = OTHER; note = adenosine-3'-phosphate
  modified_base 15: mod_base = OTHER; note = guanosine-3'-phosphate
  modified_base 16: mod_base = OTHER; note = adenosine-3'-phosphate
  modified_base 17: mod_base = OTHER; note = adenosine-3'-phosphate
  modified_base 18: mod_base = OTHER; note = guanosine-3'-phosphate
  modified_base 19: mod_base = OTHER; note = adenosine-3'-phosphate
  misc_feature 1..19: note = RNA
  misc_feature 20..21: note = DNA
tcatcttgttcccagaagatt

SEQ ID NO: 2003 - DNA, 21 bp, synthetic construct
  source 1..21: mol_type = other DNA
  modified_base 1: mod_base = OTHER; note = cytidine-3'-phosphate
  modified_base 2: mod_base = OTHER; note = cytidine-3'-phosphate
  modified_base 3: mod_base = OTHER; note = adenosine-3'-phosphate
  modified_base 4: mod_base = OTHER; note = guanosine-3'-phosphate
  modified_base 5: mod_base = OTHER; note = adenosine-3'-phosphate
  modified_base 6: mod_base = OTHER; note = adenosine-3'-phosphate
  modified_base 7: mod_base = OTHER; note = guanosine-3'-phosphate
  modified_base 8: mod_base = OTHER; note = adenosine-3'-phosphate
  modified_base 9: mod_base = OTHER; note = adenosine-3'-phosphate
  modified_base 10: mod_base = OTHER; note = adenosine-3'-phosphate
  modified_base 11: mod_base = OTHER; note = adenosine-3'-phosphate
  modified_base 12: mod_base = OTHER; note = cytidine-3'-phosphate
  modified_base 13: mod_base = OTHER; note = adenosine-3'-phosphate
  modified_base 14: mod_base = OTHER; note = guanosine-3'-phosphate
  modified_base 15: mod_base = OTHER; note = uridine-3'-phosphate
  modified_base 16: mod_base = OTHER; note = uridine-3'-phosphate
  modified_base 17: mod_base = OTHER; note = guanosine-3'-phosphate
  modified_base 18: mod_base = OTHER; note = cytidine-3'-phosphate
  modified_base 19: mod_base = OTHER; note = adenosine-3'-phosphate
  misc_feature 1..19: note = RNA
  misc_feature 20..21: note = DNA
ccagaagaaaacagttgcatt

SEQ ID NO: 2004 - DNA, 21 bp, synthetic construct
  source 1..21: mol_type = other DNA
  modified_base 1: mod_base = OTHER; note = cytidine-3'-phosphate
  modified_base 2: mod_base = OTHER; note = adenosine-3'-phosphate
  modified_base 3: mod_base = OTHER; note = guanosine-3'-phosphate
  modified_base 4: mod_base = OTHER; note = uridine-3'-phosphate
  modified_base 5: mod_base = OTHER; note = uridine-3'-phosphate
  modified_base 6: mod_base = OTHER; note = guanosine-3'-phosphate
  modified_base 7: mod_base = OTHER; note = cytidine-3'-phosphate
  modified_base 8: mod_base = OTHER; note = adenosine-3'-phosphate
  modified_base 9: mod_base = OTHER; note = guanosine-3'-phosphate
  modified_base 10: mod_base = OTHER; note = uridine-3'-phosphate
  modified_base 11: mod_base = OTHER; note = uridine-3'-phosphate
  modified_base 12: mod_base = OTHER; note = uridine-3'-phosphate
  modified_base 13: mod_base = OTHER; note = guanosine-3'-phosphate
  modified_base 14: mod_base = OTHER; note = cytidine-3'-phosphate
  modified_base 15: mod_base = OTHER; note = cytidine-3'-phosphate
  modified_base 16: mod_base = OTHER; note = cytidine-3'-phosphate
  modified_base 17: mod_base = OTHER; note = uridine-3'-phosphate
  modified_base 18: mod_base = OTHER; note = adenosine-3'-phosphate
  modified_base 19: mod_base = OTHER; note = cytidine-3'-phosphate
  misc_feature 1..19: note = RNA
  misc_feature 20..21: note = DNA
cagttgcagtttgccctactt

SEQ ID NO: 2005 - DNA, 21 bp, synthetic construct
  source 1..21: mol_type = other DNA
  modified_base 1: mod_base = OTHER; note = cytidine-3'-phosphate
  modified_base 2: mod_base = OTHER; note = adenosine-3'-phosphate
  modified_base 3: mod_base = OTHER; note = guanosine-3'-phosphate
  modified_base 4: mod_base = OTHER; note = uridine-3'-phosphate
  modified_base 5: mod_base = OTHER; note = uridine-3'-phosphate
  modified_base 6: mod_base = OTHER; note = uridine-3'-phosphate
  modified_base 7: mod_base = OTHER; note = guanosine-3'-phosphate
  modified_base 8: mod_base = OTHER; note = cytidine-3'-phosphate
  modified_base 9: mod_base = OTHER; note = cytidine-3'-phosphate
  modified_base 10: mod_base = OTHER; note = cytidine-3'-phosphate
  modified_base 11: mod_base = OTHER; note = uridine-3'-phosphate
  modified_base 12: mod_base = OTHER; note = adenosine-3'-phosphate
  modified_base 13: mod_base = OTHER; note = cytidine-3'-phosphate
  modified_base 14: mod_base = OTHER; note = cytidine-3'-phosphate
  modified_base 15: mod_base = OTHER; note = uridine-3'-phosphate
  modified_base 16: mod_base = OTHER; note = guanosine-3'-phosphate
  modified_base 17: mod_base = OTHER; note = adenosine-3'-phosphate
  modified_base 18: mod_base = OTHER; note = uridine-3'-phosphate
  modified_base 19: mod_base = OTHER; note = uridine-3'-phosphate
  misc_feature 1..19: note = RNA
  misc_feature 20..21: note = DNA
cagtttgccctacctgatttt

SEQ ID NO: 2006 - DNA, 21 bp, synthetic construct
  source 1..21: mol_type = other DNA
  modified_base 1: mod_base = OTHER; note = cytidine-3'-phosphate
  modified_base 2: mod_base = OTHER; note = cytidine-3'-phosphate
  modified_base 3: mod_base = OTHER; note = uridine-3'-phosphate
  modified_base 4: mod_base = OTHER; note = guanosine-3'-phosphate
  modified_base 5: mod_base = OTHER; note = adenosine-3'-phosphate
  modified_base 6: mod_base = OTHER; note = uridine-3'-phosphate
  modified_base 7: mod_base = OTHER; note = uridine-3'-phosphate
  modified_base 8: mod_base = OTHER; note = cytidine-3'-phosphate
  modified_base 9: mod_base = OTHER; note = uridine-3'-phosphate
  modified_base 10: mod_base = OTHER; note = cytidine-3'-phosphate
  modified_base 11: mod_base = OTHER; note = uridine-3'-phosphate
  modified_base 12: mod_base = OTHER; note = adenosine-3'-phosphate
  modified_base 13: mod_base = OTHER; note = adenosine-3'-phosphate
  modified_base 14: mod_base = OTHER; note = cytidine-3'-phosphate
  modified_base 15: mod_base = OTHER; note = cytidine-3'-phosphate
  modified_base 16: mod_base = OTHER; note = adenosine-3'-phosphate
  modified_base 17: mod_base = OTHER; note = cytidine-3'-phosphate
  modified_base 18: mod_base = OTHER; note = cytidine-3'-phosphate
  modified_base 19: mod_base = OTHER; note = uridine-3'-phosphate
  misc_feature 1..19: note = RNA
  misc_feature 20..21: note = DNA
cctgattctctaaccaccttt

SEQ ID NO: 2007 - DNA, 21 bp, synthetic construct
  source 1..21: mol_type = other DNA
  modified_base 1: mod_base = OTHER; note = adenosine-3'-phosphate
  modified_base 2: mod_base = OTHER; note = cytidine-3'-phosphate
  modified_base 3: mod_base = OTHER; note = cytidine-3'-phosphate
  modified_base 4: mod_base = OTHER; note = adenosine-3'-phosphate
  modified_base 5: mod_base = OTHER; note = cytidine-3'-phosphate
  modified_base 6: mod_base = OTHER; note = cytidine-3'-phosphate
  modified_base 7: mod_base = OTHER; note = uridine-3'-phosphate
  modified_base 8: mod_base = OTHER; note = guanosine-3'-phosphate
  modified_base 9: mod_base = OTHER; note = guanosine-3'-phosphate
  modified_base 10: mod_base = OTHER; note = guanosine-3'-phosphate
  modified_base 11: mod_base = OTHER; note = adenosine-3'-phosphate
  modified_base 12: mod_base = OTHER; note = adenosine-3'-phosphate
  modified_base 13: mod_base = OTHER; note = adenosine-3'-phosphate
  modified_base 14: mod_base = OTHER; note = uridine-3'-phosphate
  modified_base 15: mod_base = OTHER; note = uridine-3'-phosphate
  modified_base 16: mod_base = OTHER; note = cytidine-3'-phosphate
  modified_base 17: mod_base = OTHER; note = adenosine-3'-phosphate
  modified_base 18: mod_base = OTHER; note = adenosine-3'-phosphate
  modified_base 19: mod_base = OTHER; note = guanosine-3'-phosphate
  misc_feature 1..19: note = RNA
  misc_feature 20..21: note = DNA
accacctgggaaattcaagtt

SEQ ID NO: 2008 - DNA, 21 bp, synthetic construct
  source 1..21: mol_type = other DNA
  modified_base 1: mod_base = OTHER; note = guanosine-3'-phosphate
  modified_base 2: mod_base = OTHER; note = adenosine-3'-phosphate
  modified_base 3: mod_base = OTHER; note = adenosine-3'-phosphate
  modified_base 4: mod_base = OTHER; note = adenosine-3'-phosphate
  modified_base 5: mod_base = OTHER; note = uridine-3'-phosphate
  modified_base 6: mod_base = OTHER; note = uridine-3'-phosphate
  modified_base 7: mod_base = OTHER; note = cytidine-3'-phosphate
  modified_base 8: mod_base = OTHER; note = adenosine-3'-phosphate
  modified_base 9: mod_base = OTHER; note = adenosine-3'-phosphate
  modified_base 10: mod_base = OTHER; note = guanosine-3'-phosphate
  modified_base 11: mod_base = OTHER; note = guanosine-3'-phosphate
  modified_base 12: mod_base = OTHER; note = cytidine-3'-phosphate
  modified_base 13: mod_base = OTHER; note = guanosine-3'-phosphate
  modified_base 14: mod_base = OTHER; note = uridine-3'-phosphate
  modified_base 15: mod_base = OTHER; note = uridine-3'-phosphate
  modified_base 16: mod_base = OTHER; note = guanosine-3'-phosphate
  modified_base 17: mod_base = OTHER; note = guanosine-3'-phosphate
  modified_base 18: mod_base = OTHER; note = cytidine-3'-phosphate
  modified_base 19: mod_base = OTHER; note = adenosine-3'-phosphate
  misc_feature 1..19: note = RNA
  misc_feature 20..21: note = DNA
gaaattcaaggcgttggcatt

SEQ ID NO: 2009 - DNA, 21 bp, synthetic construct
  source 1..21: mol_type = other DNA
  modified_base 1: mod_base = OTHER; note = cytidine-3'-phosphate
  modified_base 2: mod_base = OTHER; note = guanosine-3'-phosphate
  modified_base 3: mod_base = OTHER; note = uridine-3'-phosphate
  modified_base 4: mod_base = OTHER; note = uridine-3'-phosphate
  modified_base 5: mod_base = OTHER; note = guanosine-3'-phosphate
  modified_base 6: mod_base = OTHER; note = guanosine-3'-phosphate
  modified_base 7: mod_base = OTHER; note = cytidine-3'-phosphate
  modified_base 8: mod_base = OTHER; note = adenosine-3'-phosphate
  modified_base 9: mod_base = OTHER; note = uridine-3'-phosphate
  modified_base 10: mod_base = OTHER; note = uridine-3'-phosphate
  modified_base 11: mod_base = OTHER; note = uridine-3'-phosphate
  modified_base 12: mod_base = OTHER; note = cytidine-3'-phosphate
  modified_base 13: mod_base = OTHER; note = adenosine-3'-phosphate
  modified_base 14: mod_base = OTHER; note = adenosine-3'-phosphate
  modified_base 15: mod_base = OTHER; note = adenosine-3'-phosphate
  modified_base 16: mod_base = OTHER; note = cytidine-3'-phosphate
  modified_base 17: mod_base = OTHER; note = adenosine-3'-phosphate
  modified_base 18: mod_base = OTHER; note = cytidine-3'-phosphate
  modified_base 19: mod_base = OTHER; note = uridine-3'-phosphate
  misc_feature 1..19: note = RNA
  misc_feature 20..21: note = DNA
cgttggcatttcaaacacttt

SEQ ID NO: 2010 - DNA, 21 bp, synthetic construct
  source 1..21: mol_type = other DNA
  modified_base 1: mod_base = OTHER; note = cytidine-3'-phosphate
  modified_base 2: mod_base = OTHER; note = adenosine-3'-phosphate
  modified_base 3: mod_base = OTHER; note = uridine-3'-phosphate
  modified_base 4: mod_base = OTHER; note = uridine-3'-phosphate
  modified_base 5: mod_base = OTHER; note = uridine-3'-phosphate
  modified_base 6: mod_base = OTHER; note = cytidine-3'-phosphate
  modified_base 7: mod_base = OTHER; note = adenosine-3'-phosphate
  modified_base 8: mod_base = OTHER; note = adenosine-3'-phosphate
  modified_base 9: mod_base = OTHER; note = adenosine-3'-phosphate
  modified_base 10: mod_base = OTHER; note = cytidine-3'-phosphate
  modified_base 11: mod_base = OTHER; note = adenosine-3'-phosphate
  modified_base 12: mod_base = OTHER; note = cytidine-3'-phosphate
  modified_base 13: mod_base = OTHER; note = uridine-3'-phosphate
  modified_base 14: mod_base = OTHER; note = guanosine-3'-phosphate
  modified_base 15: mod_base = OTHER; note = guanosine-3'-phosphate
  modified_base 16: mod_base = OTHER; note = uridine-3'-phosphate
  modified_base 17: mod_base = OTHER; note = adenosine-3'-phosphate
  modified_base 18: mod_base = OTHER; note = uridine-3'-phosphate
  modified_base 19: mod_base = OTHER; note = adenosine-3'-phosphate
  misc_feature 1..19: note = RNA
  misc_feature 20..21: note = DNA
catttcaaacactggtatatt

SEQ ID NO: 2011 - DNA, 21 bp, synthetic construct
  source 1..21: mol_type = other DNA
  modified_base 1: mod_base = OTHER; note = guanosine-3'-phosphate
  modified_base 2: mod_base = OTHER; note = uridine-3'-phosphate
  modified_base 3: mod_base = OTHER; note = adenosine-3'-phosphate
  modified_base 4: mod_base = OTHER; note = uridine-3'-phosphate
  modified_base 5: mod_base = OTHER; note = adenosine-3'-phosphate
  modified_base 6: mod_base = OTHER; note = uridine-3'-phosphate
  modified_base 7: mod_base = OTHER; note = guanosine-3'-phosphate
  modified_base 8: mod_base = OTHER; note = uridine-3'-phosphate
  modified_base 9: mod_base = OTHER; note = guanosine-3'-phosphate
  modified_base 10: mod_base = OTHER; note = uridine-3'-phosphate
  modified_base 11: mod_base = OTHER; note = uridine-3'-phosphate
  modified_base 12: mod_base = OTHER; note = guanosine-3'-phosphate
  modified_base 13: mod_base = OTHER; note = cytidine-3'-phosphate
  modified_base 14: mod_base = OTHER; note = uridine-3'-phosphate
  modified_base 15: mod_base = OTHER; note = guanosine-3'-phosphate
  modified_base 16: mod_base = OTHER; note = adenosine-3'-phosphate
  modified_base 17: mod_base = OTHER; note = uridine-3'-phosphate
  modified_base 18: mod_base = OTHER; note = adenosine-3'-phosphate
  modified_base 19: mod_base = OTHER; note = cytidine-3'-phosphate
  misc_feature 1..19: note = RNA
  misc_feature 20..21: note = DNA
gtatatgtgttgctgatactt

SEQ ID NO: 2012 - DNA, 21 bp, synthetic construct
  source 1..21: mol_type = other DNA
  modified_base 1: mod_base = OTHER; note = uridine-3'-phosphate
  modified_base 2: mod_base = OTHER; note = guanosine-3'-phosphate
  modified_base 3: mod_base = OTHER; note = cytidine-3'-phosphate
  modified_base 4: mod_base = OTHER; note = uridine-3'-phosphate
  modified_base 5: mod_base = OTHER; note = guanosine-3'-phosphate
  modified_base 6: mod_base = OTHER; note = adenosine-3'-phosphate
  modified_base 7: mod_base = OTHER; note = uridine-3'-phosphate
  modified_base 8: mod_base = OTHER; note = adenosine-3'-phosphate
  modified_base 9: mod_base = OTHER; note = cytidine-3'-phosphate
  modified_base 10: mod_base = OTHER; note = uridine-3'-phosphate
  modified_base 11: mod_base = OTHER; note = guanosine-3'-phosphate
  modified_base 12: mod_base = OTHER; note = uridine-3'-phosphate
  modified_base 13: mod_base = OTHER; note = cytidine-3'-phosphate
  modified_base 14: mod_base = OTHER; note = adenosine-3'-phosphate
  modified_base 15: mod_base = OTHER; note = adenosine-3'-phosphate
  modified_base 16: mod_base = OTHER; note = guanosine-3'-phosphate
  modified_base 17: mod_base = OTHER; note = guanosine-3'-phosphate
  modified_base 18: mod_base = OTHER; note = cytidine-3'-phosphate
  modified_base 19: mod_base = OTHER; note = adenosine-3'-phosphate
  misc_feature 1..19: note = RNA
  misc_feature 20..21: note = DNA
tgctgatactgtcaaggcatt

SEQ ID NO: 2013 - DNA, 21 bp, synthetic construct
  source 1..21: mol_type = other DNA
  modified_base 1: mod_base = OTHER; note = cytidine-3'-phosphate
  modified_base 2: mod_base = OTHER; note = uridine-3'-phosphate
  modified_base 3: mod_base = OTHER; note = guanosine-3'-phosphate
  modified_base 4: mod_base = OTHER; note = uridine-3'-phosphate
  modified_base 5: mod_base = OTHER; note = cytidine-3'-phosphate
  modified_base 6: mod_base = OTHER; note = adenosine-3'-phosphate
  modified_base 7: mod_base = OTHER; note = adenosine-3'-phosphate
  modified_base 8: mod_base = OTHER; note = guanosine-3'-phosphate
  modified_base 9: mod_base = OTHER; note = guanosine-3'-phosphate
  modified_base 10: mod_base = OTHER; note = cytidine-3'-phosphate
  modified_base 11: mod_base = OTHER; note = adenosine-3'-phosphate
  modified_base 12: mod_base = OTHER; note = adenosine-3'-phosphate
  modified_base 13: mod_base = OTHER; note = adenosine-3'-phosphate
  modified_base 14: mod_base = OTHER; note = guanosine-3'-phosphate
  modified_base 15: mod_base = OTHER; note = guanosine-3'-phosphate
  modified_base 16: mod_base = OTHER; note = uridine-3'-phosphate
  modified_base 17: mod_base = OTHER; note = guanosine-3'-phosphate
  modified_base 18: mod_base = OTHER; note = uridine-3'-phosphate
  modified_base 19: mod_base = OTHER; note = uridine-3'-phosphate
  misc_feature 1..19: note = RNA
  misc_feature 20..21: note = DNA
ctgtcaaggcaaaggtgtttt

SEQ ID NO: 2014 - DNA, 21 bp, synthetic construct
  source 1..21: mol_type = other DNA
  modified_base 1: mod_base = OTHER; note = adenosine-3'-phosphate
  modified_base 2: mod_base = OTHER; note = guanosine-3'-phosphate
  modified_base 3: mod_base = OTHER; note = guanosine-3'-phosphate
  modified_base 4: mod_base = OTHER; note = uridine-3'-phosphate
  modified_base 5: mod_base = OTHER; note = guanosine-3'-phosphate
  modified_base 6: mod_base = OTHER; note = uridine-3'-phosphate
  modified_base 7: mod_base = OTHER; note = uridine-3'-phosphate
  modified_base 8: mod_base = OTHER; note = cytidine-3'-phosphate
  modified_base 9: mod_base = OTHER; note = adenosine-3'-phosphate
  modified_base 10: mod_base = OTHER; note = adenosine-3'-phosphate
  modified_base 11: mod_base = OTHER; note = adenosine-3'-phosphate
  modified_base 12: mod_base = OTHER; note = guanosine-3'-phosphate
  modified_base 13: mod_base = OTHER; note = adenosine-3'-phosphate
  modified_base 14: mod_base = OTHER; note = uridine-3'-phosphate
  modified_base 15: mod_base = OTHER; note = guanosine-3'-phosphate
  modified_base 16: mod_base = OTHER; note = uridine-3'-phosphate
  modified_base 17: mod_base = OTHER; note = cytidine-3'-phosphate
  modified_base 18: mod_base = OTHER; note = uridine-3'-phosphate
  modified_base 19: mod_base = OTHER; note = uridine-3'-phosphate
  misc_feature 1..19: note = RNA
  misc_feature 20..21: note = DNA
aggtgttcaaagatgtctttt

SEQ ID NO: 2015 - DNA, 21 bp, synthetic construct
  source 1..21: mol_type = other DNA
  modified_base 1: mod_base = OTHER; note = cytidine-3'-phosphate
  modified_base 2: mod_base = OTHER; note = adenosine-3'-phosphate
  modified_base 3: mod_base = OTHER; note = adenosine-3'-phosphate
  modified_base 4: mod_base = OTHER; note = adenosine-3'-phosphate
  modified_base 5: mod_base = OTHER; note = guanosine-3'-phosphate
  modified_base 6: mod_base = OTHER; note = adenosine-3'-phosphate
  modified_base 7: mod_base = OTHER; note = uridine-3'-phosphate
  modified_base 8: mod_base = OTHER; note = guanosine-3'-phosphate
  modified_base 9: mod_base = OTHER; note = uridine-3'-phosphate
  modified_base 10: mod_base = OTHER; note = cytidine-3'-phosphate
  modified_base 11: mod_base = OTHER; note = uridine-3'-phosphate
  modified_base 12: mod_base = OTHER; note = uridine-3'-phosphate
  modified_base 13: mod_base = OTHER; note = cytidine-3'-phosphate
  modified_base 14: mod_base = OTHER; note = cytidine-3'-phosphate
  modified_base 15: mod_base = OTHER; note = uridine-3'-phosphate
  modified_base 16: mod_base = OTHER; note = guanosine-3'-phosphate
  modified_base 17: mod_base = OTHER; note = guanosine-3'-phosphate
  modified_base 18: mod_base = OTHER; note = adenosine-3'-phosphate
  modified_base 19: mod_base = OTHER; note = adenosine-3'-phosphate
  misc_feature 1..19: note = RNA
  misc_feature 20..21: note = DNA
caaagatgtcttcctggaatt

SEQ ID NO: 2016 - DNA, 21 bp, synthetic construct
  source 1..21: mol_type = other DNA
  modified_base 1: mod_base = OTHER; note = cytidine-3'-phosphate
  modified_base 2: mod_base = OTHER; note = uridine-3'-phosphate
  modified_base 3: mod_base = OTHER; note = uridine-3'-phosphate
  modified_base 4: mod_base = OTHER; note = cytidine-3'-phosphate
  modified_base 5: mod_base = OTHER; note = cytidine-3'-phosphate
  modified_base 6: mod_base = OTHER; note = uridine-3'-phosphate
  modified_base 7: mod_base = OTHER; note = guanosine-3'-phosphate
  modified_base 8: mod_base = OTHER; note = guanosine-3'-phosphate
  modified_base 9: mod_base = OTHER; note = adenosine-3'-phosphate
  modified_base 10: mod_base = OTHER; note = adenosine-3'-phosphate
  modified_base 11: mod_base = OTHER; note = adenosine-3'-phosphate
  modified_base 12: mod_base = OTHER; note = uridine-3'-phosphate
  modified_base 13: mod_base = OTHER; note = guanosine-3'-phosphate
  modified_base 14: mod_base = OTHER; note = adenosine-3'-phosphate
  modified_base 15: mod_base = OTHER; note = adenosine-3'-phosphate
  modified_base 16: mod_base = OTHER; note = uridine-3'-phosphate
  modified_base 17: mod_base = OTHER; note = adenosine-3'-phosphate
  modified_base 18: mod_base = OTHER; note = uridine-3'-phosphate
  modified_base 19: mod_base = OTHER; note = adenosine-3'-phosphate
  misc_feature 1..19: note = RNA
  misc_feature 20..21: note = DNA
cttcctggaaatgaatatatt

SEQ ID NO: 2017 - DNA, 21 bp, synthetic construct
  source 1..21: mol_type = other DNA
  modified_base 1: mod_base = OTHER; note = guanosine-3'-phosphate
  modified_base 2: mod_base = OTHER; note = adenosine-3'-phosphate
  modified_base 3: mod_base = OTHER; note = adenosine-3'-phosphate
  modified_base 4: mod_base = OTHER; note = uridine-3'-phosphate
  modified_base 5: mod_base = OTHER; note = adenosine-3'-phosphate
  modified_base 6: mod_base = OTHER; note = uridine-3'-phosphate
  modified_base 7: mod_base = OTHER; note = adenosine-3'-phosphate
  modified_base 8: mod_base = OTHER; note = cytidine-3'-phosphate
  modified_base 9: mod_base = OTHER; note = cytidine-3'-phosphate
  modified_base 10: mod_base = OTHER; note = adenosine-3'-phosphate
  modified_base 11: mod_base = OTHER; note = uridine-3'-phosphate
  modified_base 12: mod_base = OTHER; note = adenosine-3'-phosphate
  modified_base 13: mod_base = OTHER; note = uridine-3'-phosphate
  modified_base 14: mod_base = OTHER; note = uridine-3'-phosphate
  modified_base 15: mod_base = OTHER; note = cytidine-3'-phosphate
  modified_base 16: mod_base = OTHER; note = uridine-3'-phosphate
  modified_base 17: mod_base = OTHER; note = guanosine-3'-phosphate
  modified_base 18: mod_base = OTHER; note = uridine-3'-phosphate
  modified_base 19: mod_base = OTHER; note = uridine-3'-phosphate
  misc_feature 1..19: note = RNA
  misc_feature 20..21: note = DNA
gaatataccatattctgtttt

SEQ ID NO: 2018 - DNA, 21 bp, synthetic construct
  source 1..21: mol_type = other DNA
  modified_base 1: mod_base = OTHER; note = adenosine-3'-phosphate
  modified_base 2: mod_base = OTHER; note = uridine-3'-phosphate
  modified_base 3: mod_base = OTHER; note = adenosine-3'-phosphate
  modified_base 4: mod_base = OTHER; note = uridine-3'-phosphate
  modified_base 5: mod_base = OTHER; note = uridine-3'-phosphate
  modified_base 6: mod_base = OTHER; note = cytidine-3'-phosphate
  modified_base 7: mod_base = OTHER; note = uridine-3'-phosphate
  modified_base 8: mod_base = OTHER; note = guanosine-3'-phosphate
  modified_base 9: mod_base = OTHER; note = uridine-3'-phosphate
  modified_base 10: mod_base = OTHER; note = uridine-3'-phosphate
  modified_base 11: mod_base = OTHER; note = guanosine-3'-phosphate
  modified_base 12: mod_base = OTHER; note = uridine-3'-phosphate
  modified_base 13: mod_base = OTHER; note = adenosine-3'-phosphate
  modified_base 14: mod_base = OTHER; note = cytidine-3'-phosphate
  modified_base 15: mod_base = OTHER; note = guanosine-3'-phosphate
  modified_base 16: mod_base = OTHER; note = adenosine-3'-phosphate
  modified_base 17: mod_base = OTHER; note = guanosine-3'-phosphate
  modified_base 18: mod_base = OTHER; note = guanosine-3'-phosphate
  modified_base 19: mod_base = OTHER; note = adenosine-3'-phosphate
  misc_feature 1..19: note = RNA
  misc_feature 20..21: note = DNA
atattctgttgtacgaggatt

SEQ ID NO: 2019 - DNA, 21 bp, synthetic construct
  source 1..21: mol_type = other DNA
  modified_base 1: mod_base = OTHER; note = cytidine-3'-phosphate
  modified_base 2: mod_base = OTHER; note = guanosine-3'-phosphate
  modified_base 3: mod_base = OTHER; note = adenosine-3'-phosphate
  modified_base 4: mod_base = OTHER; note = guanosine-3'-phosphate
  modified_base 5: mod_base = OTHER; note = guanosine-3'-phosphate
  modified_base 6: mod_base = OTHER; note = adenosine-3'-phosphate
  modified_base 7: mod_base = OTHER; note = guanosine-3'-phosphate
  modified_base 8: mod_base = OTHER; note = adenosine-3'-phosphate
  modified_base 9: mod_base = OTHER; note = adenosine-3'-phosphate
  modified_base 10: mod_base = OTHER; note = cytidine-3'-phosphate
  modified_base 11: mod_base = OTHER; note = adenosine-3'-phosphate
  modified_base 12: mod_base = OTHER; note = guanosine-3'-phosphate
  modified_base 13: mod_base = OTHER; note = adenosine-3'-phosphate
  modified_base 14: mod_base = OTHER; note = uridine-3'-phosphate
  modified_base 15: mod_base = OTHER; note = cytidine-3'-phosphate
  modified_base 16: mod_base = OTHER; note = cytidine-3'-phosphate
  modified_base 17: mod_base = OTHER; note = adenosine-3'-phosphate
  modified_base 18: mod_base = OTHER; note = adenosine-3'-phosphate
  modified_base 19: mod_base = OTHER; note = uridine-3'-phosphate
  misc_feature 1..19: note = RNA
  misc_feature 20..21: note = DNA
cgaggagaacagatccaattt

SEQ ID NO: 2020 - DNA, 21 bp, synthetic construct
  source 1..21: mol_type = other DNA
  modified_base 1: mod_base = OTHER; note = guanosine-3'-phosphate
  modified_base 2: mod_base = OTHER; note = adenosine-3'-phosphate
  modified_base 3: mod_base = OTHER; note = adenosine-3'-phosphate
  modified_base 4: mod_base = OTHER; note = cytidine-3'-phosphate
  modified_base 5: mod_base = OTHER; note = adenosine-3'-phosphate
  modified_base 6: mod_base = OTHER; note = guanosine-3'-phosphate
  modified_base 7: mod_base = OTHER; note = adenosine-3'-phosphate
  modified_base 8: mod_base = OTHER; note = uridine-3'-phosphate
  modified_base 9: mod_base = OTHER; note = cytidine-3'-phosphate
  modified_base 10: mod_base = OTHER; note = cytidine-3'-phosphate
  modified_base 11: mod_base = OTHER; note = adenosine-3'-phosphate
  modified_base 12: mod_base = OTHER; note = adenosine-3'-phosphate
  modified_base 13: mod_base = OTHER; note = uridine-3'-phosphate
  modified_base 14: mod_base = OTHER; note = uridine-3'-phosphate
  modified_base 15: mod_base = OTHER; note = guanosine-3'-phosphate
  modified_base 16: mod_base = OTHER; note = adenosine-3'-phosphate
  modified_base 17: mod_base = OTHER; note = adenosine-3'-phosphate
  modified_base 18: mod_base = OTHER; note = adenosine-3'-phosphate
  modified_base 19: mod_base = OTHER; note = guanosine-3'-phosphate
  misc_feature 1..19: note = RNA
  misc_feature 20..21: note = DNA
gaacagatccaattgaaagtt

SEQ ID NO: 2021 - DNA, 21 bp, synthetic construct
  source 1..21: mol_type = other DNA
  modified_base 1: mod_base = OTHER; note = guanosine-3'-phosphate
  modified_base 2: mod_base = OTHER; note = adenosine-3'-phosphate
  modified_base 3: mod_base = OTHER; note = adenosine-3'-phosphate
  modified_base 4: mod_base = OTHER; note = adenosine-3'-phosphate
  modified_base 5: mod_base = OTHER; note = guanosine-3'-phosphate
  modified_base 6: mod_base = OTHER; note = guanosine-3'-phosphate
  modified_base 7: mod_base = OTHER; note = adenosine-3'-phosphate
  modified_base 8: mod_base = OTHER; note = adenosine-3'-phosphate
  modified_base 9: mod_base = OTHER; note = cytidine-3'-phosphate
  modified_base 10: mod_base = OTHER; note = uridine-3'-phosphate
  modified_base 11: mod_base = OTHER; note = guanosine-3'-phosphate
  modified_base 12: mod_base = OTHER; note = uridine-3'-phosphate
  modified_base 13: mod_base = OTHER; note = uridine-3'-phosphate
  modified_base 14: mod_base = OTHER; note = uridine-3'-phosphate
  modified_base 15: mod_base = OTHER; note = adenosine-3'-phosphate
  modified_base 16: mod_base = OTHER; note = cytidine-3'-phosphate
  modified_base 17: mod_base = OTHER; note = adenosine-3'-phosphate
  modified_base 18: mod_base = OTHER; note = adenosine-3'-phosphate
  modified_base 19: mod_base = OTHER; note = cytidine-3'-phosphate
  misc_feature 1..19: note = RNA
  misc_feature 20..21: note = DNA
gaaaggaactgtttacaactt

SEQ ID NO: 2022 - DNA, 21 bp, synthetic construct
  source 1..21: mol_type = other DNA
  modified_base 1: mod_base = OTHER; note = adenosine-3'-phosphate
  modified_base 2: mod_base = OTHER; note = cytidine-3'-phosphate
  modified_base 3: mod_base = OTHER; note = uridine-3'-phosphate
  modified_base 4: mod_base = OTHER; note = guanosine-3'-phosphate
  modified_base 5: mod_base = OTHER; note = uridine-3'-phosphate
  modified_base 6: mod_base = OTHER; note = uridine-3'-phosphate
  modified_base 7: mod_base = OTHER; note = uridine-3'-phosphate
  modified_base 8: mod_base = OTHER; note = adenosine-3'-phosphate
  modified_base 9: mod_base = OTHER; note = cytidine-3'-phosphate
  modified_base 10: mod_base = OTHER; note = adenosine-3'-phosphate
  modified_base 11: mod_base = OTHER; note = adenosine-3'-phosphate
  modified_base 12: mod_base = OTHER; note = cytidine-3'-phosphate
  modified_base 13: mod_base = OTHER; note = uridine-3'-phosphate
  modified_base 14: mod_base = OTHER; note = adenosine-3'-phosphate
  modified_base 15: mod_base = OTHER; note = uridine-3'-phosphate
  modified_base 16: mod_base = OTHER; note = adenosine-3'-phosphate
  modified_base 17: mod_base = OTHER; note = guanosine-3'-phosphate
  modified_base 18: mod_base = OTHER; note = guanosine-3'-phosphate
  modified_base 19: mod_base = OTHER; note = adenosine-3'-phosphate
  misc_feature 1..19: note = RNA
  misc_feature 20..21: note = DNA
actgtttacaactataggatt

SEQ ID NO: 2023 - DNA, 21 bp, synthetic construct
  source 1..21: mol_type = other DNA
  modified_base 1: mod_base = OTHER; note = adenosine-3'-phosphate
  modified_base 2: mod_base = OTHER; note = adenosine-3'-phosphate
  modified_base 3: mod_base = OTHER; note = cytidine-3'-phosphate
  modified_base 4: mod_base = OTHER; note = uridine-3'-phosphate
  modified_base 5: mod_base = OTHER; note = adenosine-3'-phosphate
  modified_base 6: mod_base = OTHER; note = uridine-3'-phosphate
  modified_base 7: mod_base = OTHER; note = adenosine-3'-phosphate
  modified_base 8: mod_base = OTHER; note = guanosine-3'-phosphate
  modified_base 9: mod_base = OTHER; note = guanosine-3'-phosphate
  modified_base 10: mod_base = OTHER; note = adenosine-3'-phosphate
  modified_base 11: mod_base = OTHER; note = cytidine-3'-phosphate
  modified_base 12: mod_base = OTHER; note = uridine-3'-phosphate
  modified_base 13: mod_base = OTHER; note = uridine-3'-phosphate
  modified_base 14: mod_base = OTHER; note = cytidine-3'-phosphate
  modified_base 15: mod_base = OTHER; note = uridine-3'-phosphate
  modified_base 16: mod_base = OTHER; note = guanosine-3'-phosphate
  modified_base 17: mod_base = OTHER; note = guanosine-3'-phosphate
  modified_base 18: mod_base = OTHER; note = guanosine-3'-phosphate
  modified_base 19: mod_base = OTHER; note = adenosine-3'-phosphate
  misc_feature 1..19: note = RNA
  misc_feature 20..21: note = DNA
aactataggacttctgggatt

SEQ ID NO: 2024 - DNA, 21 bp, synthetic construct
  source 1..21: mol_type = other DNA
  modified_base 1: mod_base = OTHER; note = uridine-3'-phosphate
  modified_base 2: mod_base = OTHER; note = guanosine-3'-phosphate
  modified_base 3: mod_base = OTHER; note = guanosine-3'-phosphate
  modified_base 4: mod_base = OTHER; note = guanosine-3'-phosphate
  modified_base 5: mod_base = OTHER; note = adenosine-3'-phosphate
  modified_base 6: mod_base = OTHER; note = uridine-3'-phosphate
  modified_base 7: mod_base = OTHER; note = guanosine-3'-phosphate
  modified_base 8: mod_base = OTHER; note = cytidine-3'-phosphate
  modified_base 9: mod_base = OTHER; note = adenosine-3'-phosphate
  modified_base 10: mod_base = OTHER; note = guanosine-3'-phosphate
  modified_base 11: mod_base = OTHER; note = uridine-3'-phosphate
  modified_base 12: mod_base = OTHER; note = uridine-3'-phosphate
  modified_base 13: mod_base = OTHER; note = cytidine-3'-phosphate
  modified_base 14: mod_base = OTHER; note = uridine-3'-phosphate
  modified_base 15: mod_base = OTHER; note = guanosine-3'-phosphate
  modified_base 16: mod_base = OTHER; note = uridine-3'-phosphate
  modified_base 17: mod_base = OTHER; note = guanosine-3'-phosphate
  modified_base 18: mod_base = OTHER; note = uridine-3'-phosphate
  modified_base 19: mod_base = OTHER; note = uridine-3'-phosphate
  misc_feature 1..19: note = RNA
  misc_feature 20..21: note = DNA
tgggatgcagttctgtgtttt

SEQ ID NO: 2025 - DNA, 21 bp, synthetic construct
  source 1..21: mol_type = other DNA
  modified_base 1: mod_base = OTHER; note = guanosine-3'-phosphate
  modified_base 2: mod_base = OTHER; note = uridine-3'-phosphate
  modified_base 3: mod_base = OTHER; note = uridine-3'-phosphate
  modified_base 4: mod_base = OTHER; note = cytidine-3'-phosphate
  modified_base 5: mod_base = OTHER; note = uridine-3'-phosphate
  modified_base 6: mod_base = OTHER; note = guanosine-3'-phosphate
  modified_base 7: mod_base = OTHER; note = uridine-3'-phosphate
  modified_base 8: mod_base = OTHER; note = guanosine-3'-phosphate
  modified_base 9: mod_base = OTHER; note = uridine-3'-phosphate
  modified_base 10: mod_base = OTHER; note = uridine-3'-phosphate
  modified_base 11: mod_base = OTHER; note = adenosine-3'-phosphate
  modified_base 12: mod_base = OTHER; note = adenosine-3'-phosphate
  modified_base 13: mod_base = OTHER; note = adenosine-3'-phosphate
  modified_base 14: mod_base = OTHER; note = adenosine-3'-phosphate
  modified_base 15: mod_base = OTHER; note = uridine-3'-phosphate
  modified_base 16: mod_base = OTHER; note = guanosine-3'-phosphate
  modified_base 17: mod_base = OTHER; note = uridine-3'-phosphate
  modified_base 18: mod_base = OTHER; note = cytidine-3'-phosphate
  modified_base 19: mod_base = OTHER; note = uridine-3'-phosphate
  misc_feature 1..19: note = RNA
  misc_feature 20..21: note = DNA
gttctgtgttaaaatgtcttt

SEQ ID NO: 2026 - DNA, 21 bp, synthetic construct
  source 1..21: mol_type = other DNA
  modified_base 1: mod_base = OTHER; note = uridine-3'-phosphate
  modified_base 2: mod_base = OTHER; note = uridine-3'-phosphate
  modified_base 3: mod_base = OTHER; note = adenosine-3'-phosphate
  modified_base 4: mod_base = OTHER; note = adenosine-3'-phosphate
  modified_base 5: mod_base = OTHER; note = adenosine-3'-phosphate
  modified_base 6: mod_base = OTHER; note = adenosine-3'-phosphate
  modified_base 7: mod_base = OTHER; note = uridine-3'-phosphate
  modified_base 8: mod_base = OTHER; note = guanosine-3'-phosphate
  modified_base 9: mod_base = OTHER; note = uridine-3'-phosphate
  modified_base 10: mod_base = OTHER; note = cytidine-3'-phosphate
  modified_base 11: mod_base = OTHER; note = uridine-3'-phosphate
  modified_base 12: mod_base = OTHER; note = guanosine-3'-phosphate
  modified_base 13: mod_base = OTHER; note = cytidine-3'-phosphate
  modified_base 14: mod_base = OTHER; note = uridine-3'-phosphate
  modified_base 15: mod_base = OTHER; note = guanosine-3'-phosphate
  modified_base 16: mod_base = OTHER; note = uridine-3'-phosphate
  modified_base 17: mod_base = OTHER; note = guanosine-3'-phosphate
  modified_base 18: mod_base = OTHER; note = guanosine-3'-phosphate
  modified_base 19: mod_base = OTHER; note = adenosine-3'-phosphate
  misc_feature 1..19: note = RNA
  misc_feature 20..21: note = DNA
ttaaaatgtctgctgtggatt

SEQ ID NO: 2027 - DNA, 21 bp, synthetic construct
  source 1..21: mol_type = other DNA
  modified_base 1: mod_base = OTHER; note = cytidine-3'-phosphate
  modified_base 2: mod_base = OTHER; note = uridine-3'-phosphate
  modified_base 3: mod_base = OTHER; note = guanosine-3'-phosphate
  modified_base 4: mod_base = OTHER; note = uridine-3'-phosphate
  modified_base 5: mod_base = OTHER; note = guanosine-3'-phosphate
  modified_base 6: mod_base = OTHER; note = guanosine-3'-phosphate
  modified_base 7: mod_base = OTHER; note = adenosine-3'-phosphate
  modified_base 8: mod_base = OTHER; note = guanosine-3'-phosphate
  modified_base 9: mod_base = OTHER; note = guanosine-3'-phosphate
  modified_base 10: mod_base = OTHER; note = guanosine-3'-phosphate
  modified_base 11: mod_base = OTHER; note = adenosine-3'-phosphate
  modified_base 12: mod_base = OTHER; note = adenosine-3'-phosphate
  modified_base 13: mod_base = OTHER; note = uridine-3'-phosphate
  modified_base 14: mod_base = OTHER; note = cytidine-3'-phosphate
  modified_base 15: mod_base = OTHER; note = uridine-3'-phosphate
  modified_base 16: mod_base = OTHER; note = guanosine-3'-phosphate
  modified_base 17: mod_base = OTHER; note = cytidine-3'-phosphate
  modified_base 18: mod_base = OTHER; note = adenosine-3'-phosphate
  modified_base 19: mod_base = OTHER; note = cytidine-3'-phosphate
  misc_feature 1..19: note = RNA
  misc_feature 20..21: note = DNA
ctgtggagggaatctgcactt

SEQ ID NO: 2028 - DNA, 21 bp, synthetic construct
  source 1..21: mol_type = other DNA
  modified_base 1: mod_base = OTHER; note = guanosine-3'-phosphate
  modified_base 2: mod_base = OTHER; note = guanosine-3'-phosphate
  modified_base 3: mod_base = OTHER; note = adenosine-3'-phosphate
  modified_base 4: mod_base = OTHER; note = adenosine-3'-phosphate
  modified_base 5: mod_base = OTHER; note = uridine-3'-phosphate
  modified_base 6: mod_base = OTHER; note = cytidine-3'-phosphate
  modified_base 7: mod_base = OTHER; note = uridine-3'-phosphate
  modified_base 8: mod_base = OTHER; note = guanosine-3'-phosphate
  modified_base 9: mod_base = OTHER; note = cytidine-3'-phosphate
  modified_base 10: mod_base = OTHER; note = adenosine-3'-phosphate
  modified_base 11: mod_base = OTHER; note = cytidine-3'-phosphate
  modified_base 12: mod_base = OTHER; note = uridine-3'-phosphate
  modified_base 13: mod_base = OTHER; note = uridine-3'-phosphate
  modified_base 14: mod_base = OTHER; note = cytidine-3'-phosphate
  modified_base 15: mod_base = OTHER; note = guanosine-3'-phosphate
  modified_base 16: mod_base = OTHER; note = guanosine-3'-phosphate
  modified_base 17: mod_base = OTHER; note = adenosine-3'-phosphate
  modified_base 18: mod_base = OTHER; note = adenosine-3'-phosphate
  modified_base 19: mod_base = OTHER; note = adenosine-3'-phosphate
  misc_feature 1..19: note = RNA
  misc_feature 20..21: note = DNA
ggaatctgcacttcggaaatt

SEQ ID NO: 2029 - DNA, 21 bp, synthetic construct
  source 1..21: mol_type = other DNA
  modified_base 1: mod_base = OTHER; note = cytidine-3'-phosphate
  modified_base 2: mod_base = OTHER; note = guanosine-3'-phosphate
  modified_base 3: mod_base = OTHER; note = guanosine-3'-phosphate
  modified_base 4: mod_base = OTHER; note = adenosine-3'-phosphate
  modified_base 5: mod_base = OTHER; note = adenosine-3'-phosphate
  modified_base 6: mod_base = OTHER; note = adenosine-3'-phosphate
  modified_base 7: mod_base = OTHER; note = guanosine-3'-phosphate
  modified_base 8: mod_base = OTHER; note = cytidine-3'-phosphate
  modified_base 9: mod_base = OTHER; note = cytidine-3'-phosphate
  modified_base 10: mod_base = OTHER; note = cytidine-3'-phosphate
  modified_base 11: mod_base = OTHER; note = adenosine-3'-phosphate
  modified_base 12: mod_base = OTHER; note = guanosine-3'-phosphate
  modified_base 13: mod_base = OTHER; note = uridine-3'-phosphate
  modified_base 14: mod_base = OTHER; note = cytidine-3'-phosphate
  modified_base 15: mod_base = OTHER; note = adenosine-3'-phosphate
  modified_base 16: mod_base = OTHER; note = uridine-3'-phosphate
  modified_base 17: mod_base = OTHER; note = uridine-3'-phosphate
  modified_base 18: mod_base = OTHER; note = guanosine-3'-phosphate
  modified_base 19: mod_base = OTHER; note = adenosine-3'-phosphate
  misc_feature 1..19: note = RNA
  misc_feature 20..21: note = DNA
cggaaagcccagtcattgatt

SEQ ID NO: 2030 - DNA, 21 bp, synthetic construct
  source 1..21: mol_type = other DNA
  modified_base 1: mod_base = OTHER; note = cytidine-3'-phosphate
  modified_base 2: mod_base = OTHER; note = cytidine-3'-phosphate
  modified_base 3: mod_base = OTHER; note = adenosine-3'-phosphate
  modified_base 4: mod_base = OTHER; note = guanosine-3'-phosphate
  modified_base 5: mod_base = OTHER; note = uridine-3'-phosphate
  modified_base 6: mod_base = OTHER; note = cytidine-3'-phosphate
  modified_base 7: mod_base = OTHER; note = adenosine-3'-phosphate
  modified_base 8: mod_base = OTHER; note = uridine-3'-phosphate
  modified_base 9: mod_base = OTHER; note = uridine-3'-phosphate
  modified_base 10: mod_base = OTHER; note = guanosine-3'-phosphate
  modified_base 11: mod_base = OTHER; note = adenosine-3'-phosphate
  modified_base 12: mod_base = OTHER; note = uridine-3'-phosphate
  modified_base 13: mod_base = OTHER; note = cytidine-3'-phosphate
  modified_base 14: mod_base = OTHER; note = adenosine-3'-phosphate
  modified_base 15: mod_base = OTHER; note = uridine-3'-phosphate
  modified_base 16: mod_base = OTHER; note = cytidine-3'-phosphate
  modified_base 17: mod_base = OTHER; note = adenosine-3'-phosphate
  modified_base 18: mod_base = OTHER; note = guanosine-3'-phosphate
  modified_base 19: mod_base = OTHER; note = guanosine-3'-phosphate
  misc_feature 1..19: note = RNA
  misc_feature 20..21: note = DNA
ccagtcattgatcatcaggtt

SEQ ID NO: 2031 - DNA, 21 bp, synthetic construct
  source 1..21: mol_type = other DNA
  modified_base 1: mod_base = OTHER; note = cytidine-3'-phosphate
  modified_base 2: mod_base = OTHER; note = adenosine-3'-phosphate
  modified_base 3: mod_base = OTHER; note = uridine-3'-phosphate
  modified_base 4: mod_base = OTHER; note = cytidine-3'-phosphate
  modified_base 5: mod_base = OTHER; note = adenosine-3'-phosphate
  modified_base 6: mod_base = OTHER; note = guanosine-3'-phosphate
  modified_base 7: mod_base = OTHER; note = guanosine-3'-phosphate
  modified_base 8: mod_base = OTHER; note = guanosine-3'-phosphate
  modified_base 9: mod_base = OTHER; note = cytidine-3'-phosphate
  modified_base 10: mod_base = OTHER; note = adenosine-3'-phosphate
  modified_base 11: mod_base = OTHER; note = cytidine-3'-phosphate
  modified_base 12: mod_base = OTHER; note = adenosine-3'-phosphate
  modified_base 13: mod_base = OTHER; note = adenosine-3'-phosphate
  modified_base 14: mod_base = OTHER; note = adenosine-3'-phosphate
  modified_base 15: mod_base = OTHER; note = guanosine-3'-phosphate
  modified_base 16: mod_base = OTHER; note = uridine-3'-phosphate
  modified_base 17: mod_base = OTHER; note = cytidine-3'-phosphate
  modified_base 18: mod_base = OTHER; note = cytidine-3'-phosphate
  modified_base 19: mod_base = OTHER; note = uridine-3'-phosphate
  misc_feature 1..19: note = RNA
  misc_feature 20..21: note = DNA
catcagggcacaaagtccttt

SEQ ID NO: 2032 - DNA, 21 bp, synthetic construct
  source 1..21: mol_type = other DNA
  modified_base 1: mod_base = OTHER; note = guanosine-3'-phosphate
  modified_base 2: mod_base = OTHER; note = guanosine-3'-phosphate
  modified_base 3: mod_base = OTHER; note = cytidine-3'-phosphate
  modified_base 4: mod_base = OTHER; note = adenosine-3'-phosphate
  modified_base 5: mod_base = OTHER; note = cytidine-3'-phosphate
  modified_base 6: mod_base = OTHER; note = adenosine-3'-phosphate
  modified_base 7: mod_base = OTHER; note = adenosine-3'-phosphate
  modified_base 8: mod_base = OTHER; note = adenosine-3'-phosphate
  modified_base 9: mod_base = OTHER; note = guanosine-3'-phosphate
  modified_base 10: mod_base = OTHER; note = uridine-3'-phosphate
  modified_base 11: mod_base = OTHER; note = cytidine-3'-phosphate
  modified_base 12: mod_base = OTHER; note = cytidine-3'-phosphate
  modified_base 13: mod_base = OTHER; note = uridine-3'-phosphate
  modified_base 14: mod_base = OTHER; note = cytidine-3'-phosphate
  modified_base 15: mod_base = OTHER; note = cytidine-3'-phosphate
  modified_base 16: mod_base = OTHER; note = adenosine-3'-phosphate
  modified_base 17: mod_base = OTHER; note = adenosine-3'-phosphate
  modified_base 18: mod_base = OTHER; note = adenosine-3'-phosphate
  modified_base 19: mod_base = OTHER; note = uridine-3'-phosphate
  misc_feature 1..19: note = RNA
  misc_feature 20..21: note = DNA
ggcacaaagtcctccaaattt

SEQ ID NO: 2033 - DNA, 21 bp, synthetic construct
  source 1..21: mol_type = other DNA
  modified_base 1: mod_base = OTHER; note = cytidine-3'-phosphate
  modified_base 2: mod_base = OTHER; note = adenosine-3'-phosphate
  modified_base 3: mod_base = OTHER; note = adenosine-3'-phosphate
  modified_base 4: mod_base = OTHER; note = adenosine-3'-phosphate
  modified_base 5: mod_base = OTHER; note = uridine-3'-phosphate
  modified_base 6: mod_base = OTHER; note = guanosine-3'-phosphate
  modified_base 7: mod_base = OTHER; note = uridine-3'-phosphate
  modified_base 8: mod_base = OTHER; note = guanosine-3'-phosphate
  modified_base 9: mod_base = OTHER; note = uridine-3'-phosphate
  modified_base 10: mod_base = OTHER; note = guanosine-3'-phosphate
  modified_base 11: mod_base = OTHER; note = cytidine-3'-phosphate
  modified_base 12: mod_base = OTHER; note = guanosine-3'-phosphate
  modified_base 13: mod_base = OTHER; note = cytidine-3'-phosphate
  modified_base 14: mod_base = OTHER; note = cytidine-3'-phosphate
  modified_base 15: mod_base = OTHER; note = adenosine-3'-phosphate
  modified_base 16: mod_base = OTHER; note = guanosine-3'-phosphate
  modified_base 17: mod_base = OTHER; note = adenosine-3'-phosphate
  modified_base 18: mod_base = OTHER; note = adenosine-3'-phosphate
  modified_base 19: mod_base = OTHER; note = adenosine-3'-phosphate
  misc_feature 1..19: note = RNA
  misc_feature 20..21: note = DNA
caaatgtgtgcgccagaaatt

SEQ ID NO: 2034 - DNA, 21 bp, synthetic construct
  source 1..21: mol_type = other DNA
  modified_base 1: mod_base = OTHER; note = guanosine-3'-phosphate
  modified_base 2: mod_base = OTHER; note = cytidine-3'-phosphate
  modified_base 3: mod_base = OTHER; note = guanosine-3'-phosphate
  modified_base 4: mod_base = OTHER; note = cytidine-3'-phosphate
  modified_base 5: mod_base = OTHER; note = cytidine-3'-phosphate
  modified_base 6: mod_base = OTHER; note = adenosine-3'-phosphate
  modified_base 7: mod_base = OTHER; note = guanosine-3'-phosphate
  modified_base 8: mod_base = OTHER; note = adenosine-3'-phosphate
  modified_base 9: mod_base = OTHER; note = adenosine-3'-phosphate
  modified_base 10: mod_base = OTHER; note = adenosine-3'-phosphate
  modified_base 11: mod_base = OTHER; note = guanosine-3'-phosphate
  modified_base 12: mod_base = OTHER; note = uridine-3'-phosphate
  modified_base 13: mod_base = OTHER; note = adenosine-3'-phosphate
  modified_base 14: mod_base = OTHER; note = guanosine-3'-phosphate
  modified_base 15: mod_base = OTHER; note = adenosine-3'-phosphate
  modified_base 16: mod_base = OTHER; note = guanosine-3'-phosphate
  modified_base 17: mod_base = OTHER; note = guanosine-3'-phosphate
  modified_base 18: mod_base = OTHER; note = guanosine-3'-phosphate
  modified_base 19: mod_base = OTHER; note = cytidine-3'-phosphate
  misc_feature 1..19: note = RNA
  misc_feature 20..21: note = DNA
gcgccagaaagtagagggctt

SEQ ID NO: 2035 - DNA, 21 bp, synthetic construct
  source 1..21: mol_type = other DNA
  modified_base 1: mod_base = OTHER; note = adenosine-3'-phosphate
  modified_base 2: mod_base = OTHER; note = guanosine-3'-phosphate
  modified_base 3: mod_base = OTHER; note = uridine-3'-phosphate
  modified_base 4: mod_base = OTHER; note = adenosine-3'-phosphate
  modified_base 5: mod_base = OTHER; note = guanosine-3'-phosphate
  modified_base 6: mod_base = OTHER; note = adenosine-3'-phosphate
  modified_base 7: mod_base = OTHER; note = guanosine-3'-phosphate
  modified_base 8: mod_base = OTHER; note = guanosine-3'-phosphate
  modified_base 9: mod_base = OTHER; note = guanosine-3'-phosphate
  modified_base 10: mod_base = OTHER; note = cytidine-3'-phosphate
  modified_base 11: mod_base = OTHER; note = uridine-3'-phosphate
  modified_base 12: mod_base = OTHER; note = cytidine-3'-phosphate
  modified_base 13: mod_base = OTHER; note = cytidine-3'-phosphate
  modified_base 14: mod_base = OTHER; note = uridine-3'-phosphate
  modified_base 15: mod_base = OTHER; note = cytidine-3'-phosphate
  modified_base 16: mod_base = OTHER; note = cytidine-3'-phosphate
  modified_base 17: mod_base = OTHER; note = adenosine-3'-phosphate
  modified_base 18: mod_base = OTHER; note = guanosine-3'-phosphate
  modified_base 19: mod_base = OTHER; note = uridine-3'-phosphate
  misc_feature 1..19: note = RNA
  misc_feature 20..21: note = DNA
agtagagggctcctccagttt

SEQ ID NO: 2036 - DNA, 21 bp, synthetic construct
  source 1..21: mol_type = other DNA
  modified_base 1: mod_base = OTHER; note = cytidine-3'-phosphate
  modified_base 2: mod_base = OTHER; note = cytidine-3'-phosphate
  modified_base 3: mod_base = OTHER; note = uridine-3'-phosphate
  modified_base 4: mod_base = OTHER; note = cytidine-3'-phosphate
  modified_base 5: mod_base = OTHER; note = cytidine-3'-phosphate
  modified_base 6: mod_base = OTHER; note = adenosine-3'-phosphate
  modified_base 7: mod_base = OTHER; note = guanosine-3'-phosphate
  modified_base 8: mod_base = OTHER; note = uridine-3'-phosphate
  modified_base 9: mod_base = OTHER; note = cytidine-3'-phosphate
  modified_base 10: mod_base = OTHER; note = adenosine-3'-phosphate
  modified_base 11: mod_base = OTHER; note = cytidine-3'-phosphate
  modified_base 12: mod_base = OTHER; note = uridine-3'-phosphate
  modified_base 13: mod_base = OTHER; note = uridine-3'-phosphate
  modified_base 14: mod_base = OTHER; note = guanosine-3'-phosphate
  modified_base 15: mod_base = OTHER; note = guanosine-3'-phosphate
  modified_base 16: mod_base = OTHER; note = uridine-3'-phosphate
  modified_base 17: mod_base = OTHER; note = guanosine-3'-phosphate
  modified_base 18: mod_base = OTHER; note = adenosine-3'-phosphate
  modified_base 19: mod_base = OTHER; note = cytidine-3'-phosphate
  misc_feature 1..19: note = RNA
  misc_feature 20..21: note = DNA
cctccagtcacttggtgactt

SEQ ID NO: 2037 - DNA, 21 bp, synthetic construct
  source 1..21: mol_type = other DNA
  modified_base 1: mod_base = OTHER; note = uridine-3'-phosphate
  modified_base 2: mod_base = OTHER; note = cytidine-3'-phosphate
  modified_base 3: mod_base = OTHER; note = adenosine-3'-phosphate
  modified_base 4: mod_base = OTHER; note = cytidine-3'-phosphate
  modified_base 5: mod_base = OTHER; note = uridine-3'-phosphate
  modified_base 6: mod_base = OTHER; note = uridine-3'-phosphate
  modified_base 7: mod_base = OTHER; note = guanosine-3'-phosphate
  modified_base 8: mod_base = OTHER; note = guanosine-3'-phosphate
  modified_base 9: mod_base = OTHER; note = uridine-3'-phosphate
  modified_base 10: mod_base = OTHER; note = guanosine-3'-phosphate
  modified_base 11: mod_base = OTHER; note = adenosine-3'-phosphate
  modified_base 12: mod_base = OTHER; note = cytidine-3'-phosphate
  modified_base 13: mod_base = OTHER; note = adenosine-3'-phosphate
  modified_base 14: mod_base = OTHER; note = uridine-3'-phosphate
  modified_base 15: mod_base = OTHER; note = uridine-3'-phosphate
  modified_base 16: mod_base = OTHER; note = cytidine-3'-phosphate
  modified_base 17: mod_base = OTHER; note = adenosine-3'-phosphate
  modified_base 18: mod_base = OTHER; note = cytidine-3'-phosphate
  modified_base 19: mod_base = OTHER; note = uridine-3'-phosphate
  misc_feature 1..19: note = RNA
  misc_feature 20..21: note = DNA
tcacttggtgacattcacttt

SEQ ID NO: 2038 - DNA, 21 bp, synthetic construct
  source 1..21: mol_type = other DNA
  modified_base 1: mod_base = OTHER; note = cytidine-3'-phosphate
  modified_base 2: mod_base = OTHER; note = adenosine-3'-phosphate
  modified_base 3: mod_base = OTHER; note = uridine-3'-phosphate
  modified_base 4: mod_base = OTHER; note = uridine-3'-phosphate
  modified_base 5: mod_base = OTHER; note = cytidine-3'-phosphate
  modified_base 6: mod_base = OTHER; note = adenosine-3'-phosphate
  modified_base 7: mod_base = OTHER; note = cytidine-3'-phosphate
  modified_base 8: mod_base = OTHER; note = uridine-3'-phosphate
  modified_base 9: mod_base = OTHER; note = guanosine-3'-phosphate
  modified_base 10: mod_base = OTHER; note = uridine-3'-phosphate
  modified_base 11: mod_base = OTHER; note = guanosine-3'-phosphate
  modified_base 12: mod_base = OTHER; note = cytidine-3'-phosphate
  modified_base 13: mod_base = OTHER; note = uridine-3'-phosphate
  modified_base 14: mod_base = OTHER; note = uridine-3'-phosphate
  modified_base 15: mod_base = OTHER; note = cytidine-3'-phosphate
  modified_base 16: mod_base = OTHER; note = cytidine-3'-phosphate
  modified_base 17: mod_base = OTHER; note = uridine-3'-phosphate
  modified_base 18: mod_base = OTHER; note = cytidine-3'-phosphate
  modified_base 19: mod_base = OTHER; note = uridine-3'-phosphate
  misc_feature 1..19: note = RNA
  misc_feature 20..21: note = DNA
cattcactgtgcttcctcttt

SEQ ID NO: 2039 - DNA, 21 bp, synthetic construct
  source 1..21: mol_type = other DNA
  modified_base 1: mod_base = OTHER; note = guanosine-3'-phosphate
  modified_base 2: mod_base = OTHER; note = guanosine-3'-phosphate
  modified_base 3: mod_base = OTHER; note = adenosine-3'-phosphate
  modified_base 4: mod_base = OTHER; note = adenosine-3'-phosphate
  modified_base 5: mod_base = OTHER; note = adenosine-3'-phosphate
  modified_base 6: mod_base = OTHER; note = uridine-3'-phosphate
  modified_base 7: mod_base = OTHER; note = uridine-3'-phosphate
  modified_base 8: mod_base = OTHER; note = guanosine-3'-phosphate
  modified_base 9: mod_base = OTHER; note = guanosine-3'-phosphate
  modified_base 10: mod_base = OTHER; note = cytidine-3'-phosphate
  modified_base 11: mod_base = OTHER; note = cytidine-3'-phosphate
  modified_base 12: mod_base = OTHER; note = uridine-3'-phosphate
  modified_base 13: mod_base = OTHER; note = uridine-3'-phosphate
  modified_base 14: mod_base = OTHER; note = cytidine-3'-phosphate
  modified_base 15: mod_base = OTHER; note = adenosine-3'-phosphate
  modified_base 16: mod_base = OTHER; note = cytidine-3'-phosphate
  modified_base 17: mod_base = OTHER; note = adenosine-3'-phosphate
  modified_base 18: mod_base = OTHER; note = adenosine-3'-phosphate
  modified_base 19: mod_base = OTHER; note = cytidine-3'-phosphate
  misc_feature 1..19: note = RNA
  misc_feature 20..21: note = DNA
ggaaattggccttcacaactt

SEQ ID NO: 2040 - DNA, 21 bp, synthetic construct
  source 1..21: mol_type = other DNA
  modified_base 1: mod_base = OTHER; note = cytidine-3'-phosphate
  modified_base 2: mod_base = OTHER; note = uridine-3'-phosphate
  modified_base 3: mod_base = OTHER; note = uridine-3'-phosphate
  modified_base 4: mod_base = OTHER; note = cytidine-3'-phosphate
  modified_base 5: mod_base = OTHER; note = adenosine-3'-phosphate
  modified_base 6: mod_base = OTHER; note = cytidine-3'-phosphate
  modified_base 7: mod_base = OTHER; note = adenosine-3'-phosphate
  modified_base 8: mod_base = OTHER; note = adenosine-3'-phosphate
  modified_base 9: mod_base = OTHER; note = cytidine-3'-phosphate
  modified_base 10: mod_base = OTHER; note = adenosine-3'-phosphate
  modified_base 11: mod_base = OTHER; note = uridine-3'-phosphate
  modified_base 12: mod_base = OTHER; note = cytidine-3'-phosphate
  modified_base 13: mod_base = OTHER; note = adenosine-3'-phosphate
  modified_base 14: mod_base = OTHER; note = adenosine-3'-phosphate
  modified_base 15: mod_base = OTHER; note = uridine-3'-phosphate
  modified_base 16: mod_base = OTHER; note = uridine-3'-phosphate
  modified_base 17: mod_base = OTHER; note = uridine-3'-phosphate
  modified_base 18: mod_base = OTHER; note = uridine-3'-phosphate
  modified_base 19: mod_base = OTHER; note = uridine-3'-phosphate
  misc_feature 1..19: note = RNA
  misc_feature 20..21: note = DNA
cttcacaacatcaattttttt

SEQ ID NO: 2041 - DNA, 21 bp, synthetic construct
  source 1..21: mol_type = other DNA
  modified_base 1: mod_base = OTHER; note = adenosine-3'-phosphate
  modified_base 2: mod_base = OTHER; note = adenosine-3'-phosphate
  modified_base 3: mod_base = OTHER; note = uridine-3'-phosphate
  modified_base 4: mod_base = OTHER; note = uridine-3'-phosphate
  modified_base 5: mod_base = OTHER; note = uridine-3'-phosphate
  modified_base 6: mod_base = OTHER; note = uridine-3'-phosphate
  modified_base 7: mod_base = OTHER; note = uridine-3'-phosphate
  modified_base 8: mod_base = OTHER; note = cytidine-3'-phosphate
  modified_base 9: mod_base = OTHER; note = adenosine-3'-phosphate
  modified_base 10: mod_base = OTHER; note = cytidine-3'-phosphate
  modified_base 11: mod_base = OTHER; note = uridine-3'-phosphate
  modified_base 12: mod_base = OTHER; note = guanosine-3'-phosphate
  modified_base 13: mod_base = OTHER; note = guanosine-3'-phosphate
  modified_base 14: mod_base = OTHER; note = adenosine-3'-phosphate
  modified_base 15: mod_base = OTHER; note = guanosine-3'-phosphate
  modified_base 16: mod_base = OTHER; note = adenosine-3'-phosphate
  modified_base 17: mod_base = OTHER; note = cytidine-3'-phosphate
  modified_base 18: mod_base = OTHER; note = uridine-3'-phosphate
  modified_base 19: mod_base = OTHER; note = uridine-3'-phosphate
  misc_feature 1..19: note = RNA
  misc_feature 20..21: note = DNA
aatttttcactggagactttt

SEQ ID NO: 2042 - DNA, 21 bp, synthetic construct
  source 1..21: mol_type = other DNA
  modified_base 1: mod_base = OTHER; note = cytidine-3'-phosphate
  modified_base 2: mod_base = OTHER; note = uridine-3'-phosphate
  modified_base 3: mod_base = OTHER; note = guanosine-3'-phosphate
  modified_base 4: mod_base = OTHER; note = guanosine-3'-phosphate
  modified_base 5: mod_base = OTHER; note = adenosine-3'-phosphate
  modified_base 6: mod_base = OTHER; note = guanosine-3'-phosphate
  modified_base 7: mod_base = OTHER; note = adenosine-3'-phosphate
  modified_base 8: mod_base = OTHER; note = cytidine-3'-phosphate
  modified_base 9: mod_base = OTHER; note = uridine-3'-phosphate
  modified_base 10: mod_base = OTHER; note = uridine-3'-phosphate
  modified_base 11: mod_base = OTHER; note = guanosine-3'-phosphate
  modified_base 12: mod_base = OTHER; note = guanosine-3'-phosphate
  modified_base 13: mod_base = OTHER; note = uridine-3'-phosphate
  modified_base 14: mod_base = OTHER; note = uridine-3'-phosphate
  modified_base 15: mod_base = OTHER; note = uridine-3'-phosphate
  modified_base 16: mod_base = OTHER; note = guanosine-3'-phosphate
  modified_base 17: mod_base = OTHER; note = guanosine-3'-phosphate
  modified_base 18: mod_base = OTHER; note = adenosine-3'-phosphate
  modified_base 19: mod_base = OTHER; note = adenosine-3'-phosphate
  misc_feature 1..19: note = RNA
  misc_feature 20..21: note = DNA
ctggagacttggtttggaatt

SEQ ID NO: 2043 - DNA, 21 bp, synthetic construct
  source 1..21: mol_type = other DNA
  modified_base 1: mod_base = OTHER; note = guanosine-3'-phosphate
  modified_base 2: mod_base = OTHER; note = guanosine-3'-phosphate
  modified_base 3: mod_base = OTHER; note = uridine-3'-phosphate
  modified_base 4: mod_base = OTHER; note = uridine-3'-phosphate
  modified_base 5: mod_base = OTHER; note = uridine-3'-phosphate
  modified_base 6: mod_base = OTHER; note = guanosine-3'-phosphate
  modified_base 7: mod_base = OTHER; note = guanosine-3'-phosphate
  modified_base 8: mod_base = OTHER; note = adenosine-3'-phosphate
  modified_base 9: mod_base = OTHER; note = adenosine-3'-phosphate
  modified_base 10: mod_base = OTHER; note = adenosine-3'-phosphate
  modified_base 11: mod_base = OTHER; note = adenosine-3'-phosphate
  modified_base 12: mod_base = OTHER; note = guanosine-3'-phosphate
  modified_base 13: mod_base = OTHER; note = adenosine-3'-phosphate
  modified_base 14: mod_base = OTHER; note = adenosine-3'-phosphate
  modified_base 15: mod_base = OTHER; note = adenosine-3'-phosphate
  modified_base 16: mod_base = OTHER; note = uridine-3'-phosphate
  modified_base 17: mod_base = OTHER; note = cytidine-3'-phosphate
  modified_base 18: mod_base = OTHER; note = uridine-3'-phosphate
  modified_base 19: mod_base = OTHER; note = uridine-3'-phosphate
  misc_feature 1..19: note = RNA
  misc_feature 20..21: note = DNA
ggtttggaaaagaaatctttt

SEQ ID NO: 2044 - DNA, 21 bp, synthetic construct
  source 1..21: mol_type = other DNA
  modified_base 1: mod_base = OTHER; note = adenosine-3'-phosphate
  modified_base 2: mod_base = OTHER; note = adenosine-3'-phosphate
  modified_base 3: mod_base = OTHER; note = uridine-3'-phosphate
  modified_base 4: mod_base = OTHER; note = cytidine-3'-phosphate
  modified_base 5: mod_base = OTHER; note = uridine-3'-phosphate
  modified_base 6: mod_base = OTHER; note = uridine-3'-phosphate
  modified_base 7: mod_base = OTHER; note = adenosine-3'-phosphate
  modified_base 8: mod_base = OTHER; note = guanosine-3'-phosphate
  modified_base 9: mod_base = OTHER; note = uridine-3'-phosphate
  modified_base 10: mod_base = OTHER; note = adenosine-3'-phosphate
  modified_base 11: mod_base = OTHER; note = adenosine-3'-phosphate
  modified_base 12: mod_base = OTHER; note = adenosine-3'-phosphate
  modified_base 13: mod_base = OTHER; note = adenosine-3'-phosphate
  modified_base 14: mod_base = OTHER; note = adenosine-3'-phosphate
  modified_base 15: mod_base = OTHER; note = cytidine-3'-phosphate
  modified_base 16: mod_base = OTHER; note = adenosine-3'-phosphate
  modified_base 17: mod_base = OTHER; note = uridine-3'-phosphate
  modified_base 18: mod_base = OTHER; note = uridine-3'-phosphate
  modified_base 19: mod_base = OTHER; note = adenosine-3'-phosphate
  misc_feature 1..19: note = RNA
  misc_feature 20..21: note = DNA
aatcttagtaaaaacattatt

SEQ ID NO: 2045 - DNA, 21 bp, synthetic construct
  source 1..21: mol_type = other DNA
  modified_base 1: mod_base = OTHER; note = adenosine-3'-phosphate
  modified_base 2: mod_base = OTHER; note = adenosine-3'-phosphate
  modified_base 3: mod_base = OTHER; note = adenosine-3'-phosphate
  modified_base 4: mod_base = OTHER; note = adenosine-3'-phosphate
  modified_base 5: mod_base = OTHER; note = adenosine-3'-phosphate
  modified_base 6: mod_base = OTHER; note = cytidine-3'-phosphate
  modified_base 7: mod_base = OTHER; note = adenosine-3'-phosphate
  modified_base 8: mod_base = OTHER; note = uridine-3'-phosphate
  modified_base 9: mod_base = OTHER; note = uridine-3'-phosphate
  modified_base 10: mod_base = OTHER; note = adenosine-3'-phosphate
  modified_base 11: mod_base = OTHER; note = cytidine-3'-phosphate
  modified_base 12: mod_base = OTHER; note = guanosine-3'-phosphate
  modified_base 13: mod_base = OTHER; note = adenosine-3'-phosphate
  modified_base 14: mod_base = OTHER; note = guanosine-3'-phosphate
  modified_base 15: mod_base = OTHER; note = uridine-3'-phosphate
  modified_base 16: mod_base = OTHER; note = guanosine-3'-phosphate
  modified_base 17: mod_base = OTHER; note = guanosine-3'-phosphate
  modified_base 18: mod_base = OTHER; note = uridine-3'-phosphate
  modified_base 19: mod_base = OTHER; note = guanosine-3'-phosphate
  misc_feature 1..19: note = RNA
  misc_feature 20..21: note = DNA
aaaaacattacgagtggtgtt

SEQ ID NO: 2046 - DNA, 21 bp, synthetic construct
  source 1..21: mol_type = other DNA
  modified_base 1: mod_base = OTHER; note = guanosine-3'-phosphate
  modified_base 2: mod_base = OTHER; note = adenosine-3'-phosphate
  modified_base 3: mod_base = OTHER; note = guanosine-3'-phosphate
  modified_base 4: mod_base = OTHER; note = uridine-3'-phosphate
  modified_base 5: mod_base = OTHER; note = guanosine-3'-phosphate
  modified_base 6: mod_base = OTHER; note = guanosine-3'-phosphate
  modified_base 7: mod_base = OTHER; note = uridine-3'-phosphate
  modified_base 8: mod_base = OTHER; note = guanosine-3'-phosphate
  modified_base 9: mod_base = OTHER; note = cytidine-3'-phosphate
  modified_base 10: mod_base = OTHER; note = cytidine-3'-phosphate
  modified_base 11: mod_base = OTHER; note = adenosine-3'-phosphate
  modified_base 12: mod_base = OTHER; note = guanosine-3'-phosphate
  modified_base 13: mod_base = OTHER; note = adenosine-3'-phosphate
  modified_base 14: mod_base = OTHER; note = adenosine-3'-phosphate
  modified_base 15: mod_base = OTHER; note = guanosine-3'-phosphate
  modified_base 16: mod_base = OTHER; note = guanosine-3'-phosphate
  modified_base 17: mod_base = OTHER; note = uridine-3'-phosphate
  modified_base 18: mod_base = OTHER; note = guanosine-3'-phosphate
  modified_base 19: mod_base = OTHER; note = uridine-3'-phosphate
  misc_feature 1..19: note = RNA
  misc_feature 20..21: note = DNA
gagtggtgccagaaggtgttt

SEQ ID NO: 2047 - DNA, 21 bp, synthetic construct
  source 1..21: mol_type = other DNA
  modified_base 1: mod_base = OTHER; note = adenosine-3'-phosphate
  modified_base 2: mod_base = OTHER; note = guanosine-3'-phosphate
  modified_base 3: mod_base = OTHER; note = adenosine-3'-phosphate
  modified_base 4: mod_base = OTHER; note = adenosine-3'-phosphate
  modified_base 5: mod_base = OTHER; note = guanosine-3'-phosphate
  modified_base 6: mod_base = OTHER; note = guanosine-3'-phosphate
  modified_base 7: mod_base = OTHER; note = uridine-3'-phosphate
  modified_base 8: mod_base = OTHER; note = guanosine-3'-phosphate
  modified_base 9: mod_base = OTHER; note = uridine-3'-phosphate
  modified_base 10: mod_base = OTHER; note = cytidine-3'-phosphate
  modified_base 11: mod_base = OTHER; note = adenosine-3'-phosphate
  modified_base 12: mod_base = OTHER; note = adenosine-3'-phosphate
  modified_base 13: mod_base = OTHER; note = adenosine-3'-phosphate
  modified_base 14: mod_base = OTHER; note = adenosine-3'-phosphate
  modified_base 15: mod_base = OTHER; note = guanosine-3'-phosphate
  modified_base 16: mod_base = OTHER; note = guanosine-3'-phosphate
  modified_base 17: mod_base = OTHER; note = guanosine-3'-phosphate
  modified_base 18: mod_base = OTHER; note = adenosine-3'-phosphate
  modified_base 19: mod_base = OTHER; note = adenosine-3'-phosphate
  misc_feature 1..19: note = RNA
  misc_feature 20..21: note = DNA
agaaggtgtcaaaagggaatt

SEQ ID NO: 2048 - DNA, 21 bp, synthetic construct
  source 1..21: mol_type = other DNA
  modified_base 1: mod_base = OTHER; note = uridine-3'-phosphate
  modified_base 2: mod_base = OTHER; note = guanosine-3'-phosphate
  modified_base 3: mod_base = OTHER; note = uridine-3'-phosphate
  modified_base 4: mod_base = OTHER; note = cytidine-3'-phosphate
  modified_base 5: mod_base = OTHER; note = adenosine-3'-phosphate
  modified_base 6: mod_base = OTHER; note = adenosine-3'-phosphate
  modified_base 7: mod_base = OTHER; note = adenosine-3'-phosphate
  modified_base 8: mod_base = OTHER; note = adenosine-3'-phosphate
  modified_base 9: mod_base = OTHER; note = guanosine-3'-phosphate
  modified_base 10: mod_base = OTHER; note = guanosine-3'-phosphate
  modified_base 11: mod_base = OTHER; note = guanosine-3'-phosphate
  modified_base 12: mod_base = OTHER; note = adenosine-3'-phosphate
  modified_base 13: mod_base = OTHER; note = adenosine-3'-phosphate
  modified_base 14: mod_base = OTHER; note = adenosine-3'-phosphate
  modified_base 15: mod_base = OTHER; note = guanosine-3'-phosphate
  modified_base 16: mod_base = OTHER; note = cytidine-3'-phosphate
  modified_base 17: mod_base = OTHER; note = uridine-3'-phosphate
  modified_base 18: mod_base = OTHER; note = adenosine-3'-phosphate
  modified_base 19: mod_base = OTHER; note = uridine-3'-phosphate
  misc_feature 1..19: note = RNA
  misc_feature 20..21: note = DNA
tgtcaaaagggaaagctattt

SEQ ID NO: 2049 - DNA, 21 bp, synthetic construct
  source 1..21: mol_type = other DNA
  modified_base 1: mod_base = OTHER; note = guanosine-3'-phosphate
  modified_base 2: mod_base = OTHER; note = cytidine-3'-phosphate
  modified_base 3: mod_base = OTHER; note = uridine-3'-phosphate
  modified_base 4: mod_base = OTHER; note = adenosine-3'-phosphate
  modified_base 5: mod_base = OTHER; note = uridine-3'-phosphate
  modified_base 6: mod_base = OTHER; note = uridine-3'-phosphate
  modified_base 7: mod_base = OTHER; note = cytidine-3'-phosphate
  modified_base 8: mod_base = OTHER; note = uridine-3'-phosphate
  modified_base 9: mod_base = OTHER; note = guanosine-3'-phosphate
  modified_base 10: mod_base = OTHER; note = guanosine-3'-phosphate
  modified_base 11: mod_base = OTHER; note = uridine-3'-phosphate
  modified_base 12: mod_base = OTHER; note = guanosine-3'-phosphate
  modified_base 13: mod_base = OTHER; note = uridine-3'-phosphate
  modified_base 14: mod_base = OTHER; note = uridine-3'-phosphate
  modified_base 15: mod_base = OTHER; note = adenosine-3'-phosphate
  modified_base 16: mod_base = OTHER; note = cytidine-3'-phosphate
  modified_base 17: mod_base = OTHER; note = uridine-3'-phosphate
  modified_base 18: mod_base = OTHER; note = uridine-3'-phosphate
  modified_base 19: mod_base = OTHER; note = uridine-3'-phosphate
  misc_feature 1..19: note = RNA
  misc_feature 20..21: note = DNA
gctattctggtgttacttttt

SEQ ID NO: 2050 - DNA, 21 bp, synthetic construct
  source 1..21: mol_type = other DNA
  modified_base 1: mod_base = OTHER; note = guanosine-3'-phosphate
  modified_base 2: mod_base = OTHER; note = uridine-3'-phosphate
  modified_base 3: mod_base = OTHER; note = guanosine-3'-phosphate
  modified_base 4: mod_base = OTHER; note = uridine-3'-phosphate
  modified_base 5: mod_base = OTHER; note = uridine-3'-phosphate
  modified_base 6: mod_base = OTHER; note = adenosine-3'-phosphate
  modified_base 7: mod_base = OTHER; note = cytidine-3'-phosphate
  modified_base 8: mod_base = OTHER; note = uridine-3'-phosphate
  modified_base 9: mod_base = OTHER; note = uridine-3'-phosphate
  modified_base 10: mod_base = OTHER; note = uridine-3'-phosphate
  modified_base 11: mod_base = OTHER; note = guanosine-3'-phosphate
  modified_base 12: mod_base = OTHER; note = guanosine-3'-phosphate
  modified_base 13: mod_base = OTHER; note = adenosine-3'-phosphate
  modified_base 14: mod_base = OTHER; note = uridine-3'-phosphate
  modified_base 15: mod_base = OTHER; note = cytidine-3'-phosphate
  modified_base 16: mod_base = OTHER; note = cytidine-3'-phosphate
  modified_base 17: mod_base = OTHER; note = uridine-3'-phosphate
  modified_base 18: mod_base = OTHER; note = adenosine-3'-phosphate
  modified_base 19: mod_base = OTHER; note = guanosine-3'-phosphate
  misc_feature 1..19: note = RNA
  misc_feature 20..21: note = DNA
gtgttactttggatcctagtt

SEQ ID NO: 2051 - DNA, 21 bp, synthetic construct
  source 1..21: mol_type = other DNA
  modified_base 1: mod_base = OTHER; note = guanosine-3'-phosphate
  modified_base 2: mod_base = OTHER; note = guanosine-3'-phosphate
  modified_base 3: mod_base = OTHER; note = adenosine-3'-phosphate
  modified_base 4: mod_base = OTHER; note = uridine-3'-phosphate
  modified_base 5: mod_base = OTHER; note = cytidine-3'-phosphate
  modified_base 6: mod_base = OTHER; note = cytidine-3'-phosphate
  modified_base 7: mod_base = OTHER; note = uridine-3'-phosphate
  modified_base 8: mod_base = OTHER; note = adenosine-3'-phosphate
  modified_base 9: mod_base = OTHER; note = guanosine-3'-phosphate
  modified_base 10: mod_base = OTHER; note = guanosine-3'-phosphate
  modified_base 11: mod_base = OTHER; note = guanosine-3'-phosphate
  modified_base 12: mod_base = OTHER; note = guanosine-3'-phosphate
  modified_base 13: mod_base = OTHER; note = uridine-3'-phosphate
  modified_base 14: mod_base = OTHER; note = adenosine-3'-phosphate
  modified_base 15: mod_base = OTHER; note = uridine-3'-phosphate
  modified_base 16: mod_base = OTHER; note = uridine-3'-phosphate
  modified_base 17: mod_base = OTHER; note = uridine-3'-phosphate
  modified_base 18: mod_base = OTHER; note = adenosine-3'-phosphate
  modified_base 19: mod_base = OTHER; note = uridine-3'-phosphate
  misc_feature 1..19: note = RNA
  misc_feature 20..21: note = DNA
ggatcctaggggtatttattt

SEQ ID NO: 2052 - DNA, 21 bp, synthetic construct
  source 1..21: mol_type = other DNA
  modified_base 1: mod_base = OTHER; note = guanosine-3'-phosphate
  modified_base 2: mod_base = OTHER; note = guanosine-3'-phosphate
  modified_base 3: mod_base = OTHER; note = uridine-3'-phosphate
  modified_base 4: mod_base = OTHER; note = adenosine-3'-phosphate
  modified_base 5: mod_base = OTHER; note = uridine-3'-phosphate
  modified_base 6: mod_base = OTHER; note = uridine-3'-phosphate
  modified_base 7: mod_base = OTHER; note = uridine-3'-phosphate
  modified_base 8: mod_base = OTHER; note = adenosine-3'-phosphate
  modified_base 9: mod_base = OTHER; note = uridine-3'-phosphate
  modified_base 10: mod_base = OTHER; note = guanosine-3'-phosphate
  modified_base 11: mod_base = OTHER; note = guanosine-3'-phosphate
  modified_base 12: mod_base = OTHER; note = uridine-3'-phosphate
  modified_base 13: mod_base = OTHER; note = adenosine-3'-phosphate
  modified_base 14: mod_base = OTHER; note = cytidine-3'-phosphate
  modified_base 15: mod_base = OTHER; note = cytidine-3'-phosphate
  modified_base 16: mod_base = OTHER; note = adenosine-3'-phosphate
  modified_base 17: mod_base = OTHER; note = uridine-3'-phosphate
  modified_base 18: mod_base = OTHER; note = uridine-3'-phosphate
  modified_base 19: mod_base = OTHER; note = adenosine-3'-phosphate
  misc_feature 1..19: note = RNA
  misc_feature 20..21: note = DNA
ggtatttatggtaccattatt

SEQ ID NO: 2053 - DNA, 21 bp, synthetic construct
  source 1..21: mol_type = other DNA
  modified_base 1: mod_base = OTHER; note = guanosine-3'-phosphate
  modified_base 2: mod_base = OTHER; note = uridine-3'-phosphate
  modified_base 3: mod_base = OTHER; note = adenosine-3'-phosphate
  modified_base 4: mod_base = OTHER; note = cytidine-3'-phosphate
  modified_base 5: mod_base = OTHER; note = cytidine-3'-phosphate
  modified_base 6: mod_base = OTHER; note = adenosine-3'-phosphate
  modified_base 7: mod_base = OTHER; note = uridine-3'-phosphate
  modified_base 8: mod_base = OTHER; note = uridine-3'-phosphate
  modified_base 9: mod_base = OTHER; note = adenosine-3'-phosphate
  modified_base 10: mod_base = OTHER; note = guanosine-3'-phosphate
  modified_base 11: mod_base = OTHER; note = cytidine-3'-phosphate
  modified_base 12: mod_base = OTHER; note = adenosine-3'-phosphate
  modified_base 13: mod_base = OTHER; note = guanosine-3'-phosphate
  modified_base 14: mod_base = OTHER; note = adenosine-3'-phosphate
  modified_base 15: mod_base = OTHER; note = cytidine-3'-phosphate
  modified_base 16: mod_base = OTHER; note = guanosine-3'-phosphate
  modified_base 17: mod_base = OTHER; note = adenosine-3'-phosphate
  modified_base 18: mod_base = OTHER; note = adenosine-3'-phosphate
  modified_base 19: mod_base = OTHER; note = adenosine-3'-phosphate
  misc_feature 1..19: note = RNA
  misc_feature 20..21: note = DNA
gtaccattagcagacgaaatt

SEQ ID NO: 2054 - DNA, 21 bp, synthetic construct
  source 1..21: mol_type = other DNA
  modified_base 1: mod_base = OTHER; note = cytidine-3'-phosphate
  modified_base 2: mod_base = OTHER; note = adenosine-3'-phosphate
  modified_base 3: mod_base = OTHER; note = guanosine-3'-phosphate
  modified_base 4: mod_base = OTHER; note = adenosine-3'-phosphate
  modified_base 5: mod_base = OTHER; note = cytidine-3'-phosphate
  modified_base 6: mod_base = OTHER; note = guanosine-3'-phosphate
  modified_base 7: mod_base = OTHER; note = adenosine-3'-phosphate
  modified_base 8: mod_base = OTHER; note = adenosine-3'-phosphate
  modified_base 9: mod_base = OTHER; note = adenosine-3'-phosphate
  modified_base 10: mod_base = OTHER; note = guanosine-3'-phosphate
  modified_base 11: mod_base = OTHER; note = guanosine-3'-phosphate
  modified_base 12: mod_base = OTHER; note = adenosine-3'-phosphate
  modified_base 13: mod_base = OTHER; note = guanosine-3'-phosphate
  modified_base 14: mod_base = OTHER; note = uridine-3'-phosphate
  modified_base 15: mod_base = OTHER; note = uridine-3'-phosphate
  modified_base 16: mod_base = OTHER; note = cytidine-3'-phosphate
  modified_base 17: mod_base = OTHER; note = cytidine-3'-phosphate
  modified_base 18: mod_base = OTHER; note = cytidine-3'-phosphate
  modified_base 19: mod_base = OTHER; note = adenosine-3'-phosphate
  misc_feature 1..19: note = RNA
  misc_feature 20..21: note = DNA
cagacgaaaggagttcccatt

SEQ ID NO: 2055 - DNA, 21 bp, synthetic construct
  source 1..21: mol_type = other DNA
  modified_base 1: mod_base = OTHER; note = adenosine-3'-phosphate
  modified_base 2: mod_base = OTHER; note = guanosine-3'-phosphate
  modified_base 3: mod_base = OTHER; note = guanosine-3'-phosphate
  modified_base 4: mod_base = OTHER; note = adenosine-3'-phosphate
  modified_base 5: mod_base = OTHER; note = guanosine-3'-phosphate
  modified_base 6: mod_base = OTHER; note = uridine-3'-phosphate
  modified_base 7: mod_base = OTHER; note = uridine-3'-phosphate
  modified_base 8: mod_base = OTHER; note = cytidine-3'-phosphate
  modified_base 9: mod_base = OTHER; note = cytidine-3'-phosphate
  modified_base 10: mod_base = OTHER; note = cytidine-3'-phosphate
  modified_base 11: mod_base = OTHER; note = adenosine-3'-phosphate
  modified_base 12: mod_base = OTHER; note = uridine-3'-phosphate
  modified_base 13: mod_base = OTHER; note = adenosine-3'-phosphate
  modified_base 14: mod_base = OTHER; note = cytidine-3'-phosphate
  modified_base 15: mod_base = OTHER; note = adenosine-3'-phosphate
  modified_base 16: mod_base = OTHER; note = guanosine-3'-phosphate
  modified_base 17: mod_base = OTHER; note = guanosine-3'-phosphate
  modified_base 18: mod_base = OTHER; note = adenosine-3'-phosphate
  modified_base 19: mod_base = OTHER; note = uridine-3'-phosphate
  misc_feature 1..19: note = RNA
  misc_feature 20..21: note = DNA
aggagttcccatacaggattt

SEQ ID NO: 2056 - DNA, 21 bp, synthetic construct
  source 1..21: mol_type = other DNA
  modified_base 1: mod_base = OTHER; note = cytidine-3'-phosphate
  modified_base 2: mod_base = OTHER; note = adenosine-3'-phosphate
  modified_base 3: mod_base = OTHER; note = uridine-3'-phosphate
  modified_base 4: mod_base = OTHER; note = adenosine-3'-phosphate
  modified_base 5: mod_base = OTHER; note = cytidine-3'-phosphate
  modified_base 6: mod_base = OTHER; note = adenosine-3'-phosphate
  modified_base 7: mod_base = OTHER; note = guanosine-3'-phosphate
  modified_base 8: mod_base = OTHER; note = guanosine-3'-phosphate
  modified_base 9: mod_base = OTHER; note = adenosine-3'-phosphate
  modified_base 10: mod_base = OTHER; note = uridine-3'-phosphate
  modified_base 11: mod_base = OTHER; note = adenosine-3'-phosphate
  modified_base 12: mod_base = OTHER; note = cytidine-3'-phosphate
  modified_base 13: mod_base = OTHER; note = cytidine-3'-phosphate
  modified_base 14: mod_base = OTHER; note = cytidine-3'-phosphate
  modified_base 15: mod_base = OTHER; note = uridine-3'-phosphate
  modified_base 16: mod_base = OTHER; note = uridine-3'-phosphate
  modified_base 17: mod_base = OTHER; note = adenosine-3'-phosphate
  modified_base 18: mod_base = OTHER; note = guanosine-3'-phosphate
  modified_base 19: mod_base = OTHER; note = adenosine-3'-phosphate
  misc_feature 1..19: note = RNA
  misc_feature 20..21: note = DNA
catacaggatacccttagatt

SEQ ID NO: 2057 - DNA, 21 bp, synthetic construct
  source 1..21: mol_type = other DNA
  modified_base 1: mod_base = OTHER; note = cytidine-3'-phosphate
  modified_base 2: mod_base = OTHER; note = uridine-3'-phosphate
  modified_base 3: mod_base = OTHER; note = uridine-3'-phosphate
  modified_base 4: mod_base = OTHER; note = adenosine-3'-phosphate
  modified_base 5: mod_base = OTHER; note = guanosine-3'-phosphate
  modified_base 6: mod_base = OTHER; note = adenosine-3'-phosphate
  modified_base 7: mod_base = OTHER; note = uridine-3'-phosphate
  modified_base 8: mod_base = OTHER; note = uridine-3'-phosphate
  modified_base 9: mod_base = OTHER; note = uridine-3'-phosphate
  modified_base 10: mod_base = OTHER; note = guanosine-3'-phosphate
  modified_base 11: mod_base = OTHER; note = guanosine-3'-phosphate
  modified_base 12: mod_base = OTHER; note = uridine-3'-phosphate
  modified_base 13: mod_base = OTHER; note = cytidine-3'-phosphate
  modified_base 14: mod_base = OTHER; note = cytidine-3'-phosphate
  modified_base 15: mod_base = OTHER; note = cytidine-3'-phosphate
  modified_base 16: mod_base = OTHER; note = cytidine-3'-phosphate
  modified_base 17: mod_base = OTHER; note = adenosine-3'-phosphate
  modified_base 18: mod_base = OTHER; note = adenosine-3'-phosphate
  modified_base 19: mod_base = OTHER; note = adenosine-3'-phosphate
  misc_feature 1..19: note = RNA
  misc_feature 20..21: note = DNA
cttagatttggtccccaaatt

SEQ ID NO: 2058 - DNA, 21 bp, synthetic construct
  source 1..21: mol_type = other DNA
  modified_base 1: mod_base = OTHER; note = uridine-3'-phosphate
  modified_base 2: mod_base = OTHER; note = cytidine-3'-phosphate
  modified_base 3: mod_base = OTHER; note = cytidine-3'-phosphate
  modified_base 4: mod_base = OTHER; note = cytidine-3'-phosphate
  modified_base 5: mod_base = OTHER; note = cytidine-3'-phosphate
  modified_base 6: mod_base = OTHER; note = adenosine-3'-phosphate
  modified_base 7: mod_base = OTHER; note = adenosine-3'-phosphate
  modified_base 8: mod_base = OTHER; note = adenosine-3'-phosphate
  modified_base 9: mod_base = OTHER; note = adenosine-3'-phosphate
  modified_base 10: mod_base = OTHER; note = cytidine-3'-phosphate
  modified_base 11: mod_base = OTHER; note = adenosine-3'-phosphate
  modified_base 12: mod_base = OTHER; note = guanosine-3'-phosphate
  modified_base 13: mod_base = OTHER; note = adenosine-3'-phosphate
  modified_base 14: mod_base = OTHER; note = adenosine-3'-phosphate
  modified_base 15: mod_base = OTHER; note = adenosine-3'-phosphate
  modified_base 16: mod_base = OTHER; note = uridine-3'-phosphate
  modified_base 17: mod_base = OTHER; note = cytidine-3'-phosphate
  modified_base 18: mod_base = OTHER; note = adenosine-3'-phosphate
  modified_base 19: mod_base = OTHER; note = adenosine-3'-phosphate
  misc_feature 1..19: note = RNA
  misc_feature 20..21: note = DNA
tccccaaaacagaaatcaatt

SEQ ID NO: 2059 - DNA, 21 bp, synthetic construct
  source 1..21: mol_type = other DNA
  modified_base 1: mod_base = OTHER; note = adenosine-3'-phosphate
  modified_base 2: mod_base = OTHER; note = cytidine-3'-phosphate
  modified_base 3: mod_base = OTHER; note = adenosine-3'-phosphate
  modified_base 4: mod_base = OTHER; note = guanosine-3'-phosphate
  modified_base 5: mod_base = OTHER; note = adenosine-3'-phosphate
  modified_base 6: mod_base = OTHER; note = adenosine-3'-phosphate
  modified_base 7: mod_base = OTHER; note = adenosine-3'-phosphate
  modified_base 8: mod_base = OTHER; note = uridine-3'-phosphate
  modified_base 9: mod_base = OTHER; note = cytidine-3'-phosphate
  modified_base 10: mod_base = OTHER; note = adenosine-3'-phosphate
  modified_base 11: mod_base = OTHER; note = adenosine-3'-phosphate
  modified_base 12: mod_base = OTHER; note = adenosine-3'-phosphate
  modified_base 13: mod_base = OTHER; note = adenosine-3'-phosphate
  modified_base 14: mod_base = OTHER; note = guanosine-3'-phosphate
  modified_base 15: mod_base = OTHER; note = guanosine-3'-phosphate
  modified_base 16: mod_base = OTHER; note = adenosine-3'-phosphate
  modified_base 17: mod_base = OTHER; note = uridine-3'-phosphate
  modified_base 18: mod_base = OTHER; note = uridine-3'-phosphate
  modified_base 19: mod_base = OTHER; note = uridine-3'-phosphate
  misc_feature 1..19: note = RNA
  misc_feature 20..21: note = DNA
acagaaatcaaaaggattttt

SEQ ID NO: 2060 - DNA, 21 bp, synthetic construct
  source 1..21: mol_type = other DNA
  modified_base 1: mod_base = OTHER; note = adenosine-3'-phosphate
  modified_base 2: mod_base = OTHER; note = adenosine-3'-phosphate
  modified_base 3: mod_base = OTHER; note = adenosine-3'-phosphate
  modified_base 4: mod_base = OTHER; note = guanosine-3'-phosphate
  modified_base 5: mod_base = OTHER; note = guanosine-3'-phosphate
  modified_base 6: mod_base = OTHER; note = adenosine-3'-phosphate
  modified_base 7: mod_base = OTHER; note = uridine-3'-phosphate
  modified_base 8: mod_base = OTHER; note = uridine-3'-phosphate
  modified_base 9: mod_base = OTHER; note = uridine-3'-phosphate
  modified_base 10: mod_base = OTHER; note = uridine-3'-phosphate
  modified_base 11: mod_base = OTHER; note = guanosine-3'-phosphate
  modified_base 12: mod_base = OTHER; note = adenosine-3'-phosphate
  modified_base 13: mod_base = OTHER; note = guanosine-3'-phosphate
  modified_base 14: mod_base = OTHER; note = uridine-3'-phosphate
  modified_base 15: mod_base = OTHER; note = guanosine-3'-phosphate
  modified_base 16: mod_base = OTHER; note = uridine-3'-phosphate
  modified_base 17: mod_base = OTHER; note = adenosine-3'-phosphate
  modified_base 18: mod_base = OTHER; note = adenosine-3'-phosphate
  modified_base 19: mod_base = OTHER; note = adenosine-3'-phosphate
  misc_feature 1..19: note = RNA
  misc_feature 20..21: note = DNA
aaaggattttgagtgtaaatt

SEQ ID NO: 2061 - DNA, 21 bp, synthetic construct
  source 1..21: mol_type = other DNA
  modified_base 1: mod_base = OTHER; note = adenosine-3'-phosphate
  modified_base 2: mod_base = OTHER; note = guanosine-3'-phosphate
  modified_base 3: mod_base = OTHER; note = uridine-3'-phosphate
  modified_base 4: mod_base = OTHER; note = guanosine-3'-phosphate
  modified_base 5: mod_base = OTHER; note = uridine-3'-phosphate
  modified_base 6: mod_base = OTHER; note = adenosine-3'-phosphate
  modified_base 7: mod_base = OTHER; note = adenosine-3'-phosphate
  modified_base 8: mod_base = OTHER; note = adenosine-3'-phosphate
  modified_base 9: mod_base = OTHER; note = adenosine-3'-phosphate
  modified_base 10: mod_base = OTHER; note = guanosine-3'-phosphate
  modified_base 11: mod_base = OTHER; note = guanosine-3'-phosphate
  modified_base 12: mod_base = OTHER; note = adenosine-3'-phosphate
  modified_base 13: mod_base = OTHER; note = cytidine-3'-phosphate
  modified_base 14: mod_base = OTHER; note = uridine-3'-phosphate
  modified_base 15: mod_base = OTHER; note = guanosine-3'-phosphate
  modified_base 16: mod_base = OTHER; note = cytidine-3'-phosphate
  modified_base 17: mod_base = OTHER; note = uridine-3'-phosphate
  modified_base 18: mod_base = OTHER; note = uridine-3'-phosphate
  modified_base 19: mod_base = OTHER; note = guanosine-3'-phosphate
  misc_feature 1..19: note = RNA
  misc_feature 20..21: note = DNA
agtgtaaaaggactgcttgtt

SEQ ID NO: 2062 - DNA, 21 bp, synthetic construct
  source 1..21: mol_type = other DNA
  modified_base 1: mod_base = OTHER; note = adenosine-3'-phosphate
  modified_base 2: mod_base = OTHER; note = adenosine-3'-phosphate
  modified_base 3: mod_base = OTHER; note = guanosine-3'-phosphate
  modified_base 4: mod_base = OTHER; note = guanosine-3'-phosphate
  modified_base 5: mod_base = OTHER; note = adenosine-3'-phosphate
  modified_base 6: mod_base = OTHER; note = cytidine-3'-phosphate
  modified_base 7: mod_base = OTHER; note = uridine-3'-phosphate
  modified_base 8: mod_base = OTHER; note = guanosine-3'-phosphate
  modified_base 9: mod_base = OTHER; note = cytidine-3'-phosphate
  modified_base 10: mod_base = OTHER; note = uridine-3'-phosphate
  modified_base 11: mod_base = OTHER; note = uridine-3'-phosphate
  modified_base 12: mod_base = OTHER; note = guanosine-3'-phosphate
  modified_base 13: mod_base = OTHER; note = uridine-3'-phosphate
  modified_base 14: mod_base = OTHER; note = adenosine-3'-phosphate
  modified_base 15: mod_base = OTHER; note = guanosine-3'-phosphate
  modified_base 16: mod_base = OTHER; note = guanosine-3'-phosphate
  modified_base 17: mod_base = OTHER; note = uridine-3'-phosphate
  modified_base 18: mod_base = OTHER; note = guanosine-3'-phosphate
  modified_base 19: mod_base = OTHER; note = adenosine-3'-phosphate
  misc_feature 1..19: note = RNA
  misc_feature 20..21: note = DNA
aaggactgcttgtaggtgatt

SEQ ID NO: 2063 - DNA, 21 bp, synthetic construct
  source 1..21: mol_type = other DNA
  modified_base 1: mod_base = OTHER; note = guanosine-3'-phosphate
  modified_base 2: mod_base = OTHER; note = uridine-3'-phosphate
  modified_base 3: mod_base = OTHER; note = adenosine-3'-phosphate
  modified_base 4: mod_base = OTHER; note = guanosine-3'-phosphate
  modified_base 5: mod_base = OTHER; note = guanosine-3'-phosphate
  modified_base 6: mod_base = OTHER; note = uridine-3'-phosphate
  modified_base 7: mod_base = OTHER; note = guanosine-3'-phosphate
  modified_base 8: mod_base = OTHER; note = adenosine-3'-phosphate
  modified_base 9: mod_base = OTHER; note = guanosine-3'-phosphate
  modified_base 10: mod_base = OTHER; note = adenosine-3'-phosphate
  modified_base 11: mod_base = OTHER; note = uridine-3'-phosphate
  modified_base 12: mod_base = OTHER; note = cytidine-3'-phosphate
  modified_base 13: mod_base = OTHER; note = uridine-3'-phosphate
  modified_base 14: mod_base = OTHER; note = uridine-3'-phosphate
  modified_base 15: mod_base = OTHER; note = guanosine-3'-phosphate
  modified_base 16: mod_base = OTHER; note = uridine-3'-phosphate
  modified_base 17: mod_base = OTHER; note = cytidine-3'-phosphate
  modified_base 18: mod_base = OTHER; note = uridine-3'-phosphate
  modified_base 19: mod_base = OTHER; note = guanosine-3'-phosphate
  misc_feature 1..19: note = RNA
  misc_feature 20..21: note = DNA
gtaggtgagatcttgtctgtt

SEQ ID NO: 2064 - DNA, 21 bp, synthetic construct
  source 1..21: mol_type = other DNA
  modified_base 1: mod_base = OTHER; note = adenosine-3'-phosphate
  modified_base 2: mod_base = OTHER; note = uridine-3'-phosphate
  modified_base 3: mod_base = OTHER; note = cytidine-3'-phosphate
  modified_base 4: mod_base = OTHER; note = uridine-3'-phosphate
  modified_base 5: mod_base = OTHER; note = uridine-3'-phosphate
  modified_base 6: mod_base = OTHER; note = guanosine-3'-phosphate
  modified_base 7: mod_base = OTHER; note = uridine-3'-phosphate
  modified_base 8: mod_base = OTHER; note = cytidine-3'-phosphate
  modified_base 9: mod_base = OTHER; note = uridine-3'-phosphate
  modified_base 10: mod_base = OTHER; note = guanosine-3'-phosphate
  modified_base 11: mod_base = OTHER; note = cytidine-3'-phosphate
  modified_base 12: mod_base = OTHER; note = adenosine-3'-phosphate
  modified_base 13: mod_base = OTHER; note = guanosine-3'-phosphate
  modified_base 14: mod_base = OTHER; note = uridine-3'-phosphate
  modified_base 15: mod_base = OTHER; note = uridine-3'-phosphate
  modified_base 16: mod_base = OTHER; note = cytidine-3'-phosphate
  modified_base 17: mod_base = OTHER; note = uridine-3'-phosphate
  modified_base 18: mod_base = OTHER; note = adenosine-3'-phosphate
  modified_base 19: mod_base = OTHER; note = adenosine-3'-phosphate
  misc_feature 1..19: note = RNA
  misc_feature 20..21: note = DNA
atcttgtctgcagttctaatt

SEQ ID NO: 2065 - DNA, 21 bp, synthetic construct
  source 1..21: mol_type = other DNA
  modified_base 1: mod_base = OTHER; note = guanosine-3'-phosphate
  modified_base 2: mod_base = OTHER; note = uridine-3'-phosphate
  modified_base 3: mod_base = OTHER; note = uridine-3'-phosphate
  modified_base 4: mod_base = OTHER; note = cytidine-3'-phosphate
  modified_base 5: mod_base = OTHER; note = uridine-3'-phosphate
  modified_base 6: mod_base = OTHER; note = adenosine-3'-phosphate
  modified_base 7: mod_base = OTHER; note = adenosine-3'-phosphate
  modified_base 8: mod_base = OTHER; note = guanosine-3'-phosphate
  modified_base 9: mod_base = OTHER; note = uridine-3'-phosphate
  modified_base 10: mod_base = OTHER; note = cytidine-3'-phosphate
  modified_base 11: mod_base = OTHER; note = adenosine-3'-phosphate
  modified_base 12: mod_base = OTHER; note = guanosine-3'-phosphate
  modified_base 13: mod_base = OTHER; note = guanosine-3'-phosphate
  modified_base 14: mod_base = OTHER; note = adenosine-3'-phosphate
  modified_base 15: mod_base = OTHER; note = adenosine-3'-phosphate
  modified_base 16: mod_base = OTHER; note = guanosine-3'-phosphate
  modified_base 17: mod_base = OTHER; note = guanosine-3'-phosphate
  modified_base 18: mod_base = OTHER; note = cytidine-3'-phosphate
  modified_base 19: mod_base = OTHER; note = adenosine-3'-phosphate
  misc_feature 1..19: note = RNA
  misc_feature 20..21: note = DNA
gttctaagtcaggaaggcatt

SEQ ID NO: 2066 - DNA, 21 bp, synthetic construct
  source 1..21: mol_type = other DNA
  modified_base 1: mod_base = OTHER; note = guanosine-3'-phosphate
  modified_base 2: mod_base = OTHER; note = adenosine-3'-phosphate
  modified_base 3: mod_base = OTHER; note = adenosine-3'-phosphate
  modified_base 4: mod_base = OTHER; note = guanosine-3'-phosphate
  modified_base 5: mod_base = OTHER; note = guanosine-3'-phosphate
  modified_base 6: mod_base = OTHER; note = cytidine-3'-phosphate
  modified_base 7: mod_base = OTHER; note = adenosine-3'-phosphate
  modified_base 8: mod_base = OTHER; note = uridine-3'-phosphate
  modified_base 9: mod_base = OTHER; note = cytidine-3'-phosphate
  modified_base 10: mod_base = OTHER; note = adenosine-3'-phosphate
  modified_base 11: mod_base = OTHER; note = adenosine-3'-phosphate
  modified_base 12: mod_base = OTHER; note = uridine-3'-phosphate
  modified_base 13: mod_base = OTHER; note = adenosine-3'-phosphate
  modified_base 14: mod_base = OTHER; note = uridine-3'-phosphate
  modified_base 15: mod_base = OTHER; note = cytidine-3'-phosphate
  modified_base 16: mod_base = OTHER; note = cytidine-3'-phosphate
  modified_base 17: mod_base = OTHER; note = uridine-3'-phosphate
  modified_base 18: mod_base = OTHER; note = adenosine-3'-phosphate
  modified_base 19: mod_base = OTHER; note = adenosine-3'-phosphate
  misc_feature 1..19: note = RNA
  misc_feature 20..21: note = DNA
gaaggcatcaatatcctaatt

SEQ ID NO: 2067 - DNA, 21 bp, synthetic construct
  source 1..21: mol_type = other DNA
  modified_base 1: mod_base = OTHER; note = uridine-3'-phosphate
  modified_base 2: mod_base = OTHER; note = cytidine-3'-phosphate
  modified_base 3: mod_base = OTHER; note = adenosine-3'-phosphate
  modified_base 4: mod_base = OTHER; note = adenosine-3'-phosphate
  modified_base 5: mod_base = OTHER; note = uridine-3'-phosphate
  modified_base 6: mod_base = OTHER; note = adenosine-3'-phosphate
  modified_base 7: mod_base = OTHER; note = uridine-3'-phosphate
  modified_base 8: mod_base = OTHER; note = cytidine-3'-phosphate
  modified_base 9: mod_base = OTHER; note = cytidine-3'-phosphate
  modified_base 10: mod_base = OTHER; note = uridine-3'-phosphate
  modified_base 11: mod_base = OTHER; note = adenosine-3'-phosphate
  modified_base 12: mod_base = OTHER; note = adenosine-3'-phosphate
  modified_base 13: mod_base = OTHER; note = cytidine-3'-phosphate
  modified_base 14: mod_base = OTHER; note = cytidine-3'-phosphate
  modified_base 15: mod_base = OTHER; note = cytidine-3'-phosphate
  modified_base 16: mod_base = OTHER; note = adenosine-3'-phosphate
  modified_base 17: mod_base = OTHER; note = cytidine-3'-phosphate
  modified_base 18: mod_base = OTHER; note = cytidine-3'-phosphate
  modified_base 19: mod_base = OTHER; note = uridine-3'-phosphate
  misc_feature 1..19: note = RNA
  misc_feature 20..21: note = DNA
tcaatatcctaacccaccttt

SEQ ID NO: 2068 - DNA, 21 bp, synthetic construct
  source 1..21: mol_type = other DNA
  modified_base 1: mod_base = OTHER; note = cytidine-3'-phosphate
  modified_base 2: mod_base = OTHER; note = cytidine-3'-phosphate
  modified_base 3: mod_base = OTHER; note = adenosine-3'-phosphate
  modified_base 4: mod_base = OTHER; note = cytidine-3'-phosphate
  modified_base 5: mod_base = OTHER; note = cytidine-3'-phosphate
  modified_base 6: mod_base = OTHER; note = uridine-3'-phosphate
  modified_base 7: mod_base = OTHER; note = cytidine-3'-phosphate
  modified_base 8: mod_base = OTHER; note = cytidine-3'-phosphate
  modified_base 9: mod_base = OTHER; note = cytidine-3'-phosphate
  modified_base 10: mod_base = OTHER; note = cytidine-3'-phosphate
  modified_base 11: mod_base = OTHER; note = adenosine-3'-phosphate
  modified_base 12: mod_base = OTHER; note = adenosine-3'-phosphate
  modified_base 13: mod_base = OTHER; note = adenosine-3'-phosphate
  modified_base 14: mod_base = OTHER; note = guanosine-3'-phosphate
  modified_base 15: mod_base = OTHER; note = guanosine-3'-phosphate
  modified_base 16: mod_base = OTHER; note = guanosine-3'-phosphate
  modified_base 17: mod_base = OTHER; note = adenosine-3'-phosphate
  modified_base 18: mod_base = OTHER; note = guanosine-3'-phosphate
  modified_base 19: mod_base = OTHER; note = uridine-3'-phosphate
  misc_feature 1..19: note = RNA
  misc_feature 20..21: note = DNA
ccacctccccaaagggagttt

SEQ ID NO: 2069 - DNA, 21 bp, synthetic construct
  source 1..21: mol_type = other DNA
  modified_base 1: mod_base = OTHER; note = cytidine-3'-phosphate
  modified_base 2: mod_base = OTHER; note = cytidine-3'-phosphate
  modified_base 3: mod_base = OTHER; note = cytidine-3'-phosphate
  modified_base 4: mod_base = OTHER; note = cytidine-3'-phosphate
  modified_base 5: mod_base = OTHER; note = adenosine-3'-phosphate
  modified_base 6: mod_base = OTHER; note = adenosine-3'-phosphate
  modified_base 7: mod_base = OTHER; note = adenosine-3'-phosphate
  modified_base 8: mod_base = OTHER; note = guanosine-3'-phosphate
  modified_base 9: mod_base = OTHER; note = guanosine-3'-phosphate
  modified_base 10: mod_base = OTHER; note = guanosine-3'-phosphate
  modified_base 11: mod_base = OTHER; note = adenosine-3'-phosphate
  modified_base 12: mod_base = OTHER; note = guanosine-3'-phosphate
  modified_base 13: mod_base = OTHER; note = uridine-3'-phosphate
  modified_base 14: mod_base = OTHER; note = guanosine-3'-phosphate
  modified_base 15: mod_base = OTHER; note = cytidine-3'-phosphate
  modified_base 16: mod_base = OTHER; note = adenosine-3'-phosphate
  modified_base 17: mod_base = OTHER; note = guanosine-3'-phosphate
  modified_base 18: mod_base = OTHER; note = adenosine-3'-phosphate
  modified_base 19: mod_base = OTHER; note = guanosine-3'-phosphate
  misc_feature 1..19: note = RNA
  misc_feature 20..21: note = DNA
ccccaaagggagtgcagagtt

SEQ ID NO: 2070 - DNA, 21 bp, synthetic construct
  source 1..21: mol_type = other DNA
  modified_base 1: mod_base = OTHER; note = guanosine-3'-phosphate
  modified_base 2: mod_base = OTHER; note = uridine-3'-phosphate
  modified_base 3: mod_base = OTHER; note = guanosine-3'-phosphate
  modified_base 4: mod_base = OTHER; note = cytidine-3'-phosphate
  modified_base 5: mod_base = OTHER; note = adenosine-3'-phosphate
  modified_base 6: mod_base = OTHER; note = guanosine-3'-phosphate
  modified_base 7: mod_base = OTHER; note = adenosine-3'-phosphate
  modified_base 8: mod_base = OTHER; note = guanosine-3'-phosphate
  modified_base 9: mod_base = OTHER; note = guanosine-3'-phosphate
  modified_base 10: mod_base = OTHER; note = cytidine-3'-phosphate
  modified_base 11: mod_base = OTHER; note = guanosine-3'-phosphate
  modified_base 12: mod_base = OTHER; note = guanosine-3'-phosphate
  modified_base 13: mod_base = OTHER; note = adenosine-3'-phosphate
  modified_base 14: mod_base = OTHER; note = guanosine-3'-phosphate
  modified_base 15: mod_base = OTHER; note = cytidine-3'-phosphate
  modified_base 16: mod_base = OTHER; note = uridine-3'-phosphate
  modified_base 17: mod_base = OTHER; note = guanosine-3'-phosphate
  modified_base 18: mod_base = OTHER; note = adenosine-3'-phosphate
  modified_base 19: mod_base = OTHER; note = uridine-3'-phosphate
  misc_feature 1..19: note = RNA
  misc_feature 20..21: note = DNA
gtgcagaggcggagctgattt

SEQ ID NO: 2071 - DNA, 21 bp, synthetic construct
  source 1..21: mol_type = other DNA
  modified_base 1: mod_base = OTHER; note = guanosine-3'-phosphate
  modified_base 2: mod_base = OTHER; note = guanosine-3'-phosphate
  modified_base 3: mod_base = OTHER; note = adenosine-3'-phosphate
  modified_base 4: mod_base = OTHER; note = guanosine-3'-phosphate
  modified_base 5: mod_base = OTHER; note = cytidine-3'-phosphate
  modified_base 6: mod_base = OTHER; note = uridine-3'-phosphate
  modified_base 7: mod_base = OTHER; note = guanosine-3'-phosphate
  modified_base 8: mod_base = OTHER; note = adenosine-3'-phosphate
  modified_base 9: mod_base = OTHER; note = uridine-3'-phosphate
  modified_base 10: mod_base = OTHER; note = guanosine-3'-phosphate
  modified_base 11: mod_base = OTHER; note = adenosine-3'-phosphate
  modified_base 12: mod_base = OTHER; note = guanosine-3'-phosphate
  modified_base 13: mod_base = OTHER; note = cytidine-3'-phosphate
  modified_base 14: mod_base = OTHER; note = guanosine-3'-phosphate
  modified_base 15: mod_base = OTHER; note = uridine-3'-phosphate
  modified_base 16: mod_base = OTHER; note = uridine-3'-phosphate
  modified_base 17: mod_base = OTHER; note = guanosine-3'-phosphate
  modified_base 18: mod_base = OTHER; note = uridine-3'-phosphate
  modified_base 19: mod_base = OTHER; note = cytidine-3'-phosphate
  misc_feature 1..19: note = RNA
  misc_feature 20..21: note = DNA
ggagctgatgagcgttgtctt

SEQ ID NO: 2072 - DNA, 21 bp, synthetic construct
  source 1..21: mol_type = other DNA
  modified_base 1: mod_base = OTHER; note = cytidine-3'-phosphate
  modified_base 2: mod_base = OTHER; note = guanosine-3'-phosphate
  modified_base 3: mod_base = OTHER; note = uridine-3'-phosphate
  modified_base 4: mod_base = OTHER; note = uridine-3'-phosphate
  modified_base 5: mod_base = OTHER; note = guanosine-3'-phosphate
  modified_base 6: mod_base = OTHER; note = uridine-3'-phosphate
  modified_base 7: mod_base = OTHER; note = cytidine-3'-phosphate
  modified_base 8: mod_base = OTHER; note = cytidine-3'-phosphate
  modified_base 9: mod_base = OTHER; note = cytidine-3'-phosphate
  modified_base 10: mod_base = OTHER; note = adenosine-3'-phosphate
  modified_base 11: mod_base = OTHER; note = guanosine-3'-phosphate
  modified_base 12: mod_base = OTHER; note = uridine-3'-phosphate
  modified_base 13: mod_base = OTHER; note = adenosine-3'-phosphate
  modified_base 14: mod_base = OTHER; note = uridine-3'-phosphate
  modified_base 15: mod_base = OTHER; note = uridine-3'-phosphate
  modified_base 16: mod_base = OTHER; note = cytidine-3'-phosphate
  modified_base 17: mod_base = OTHER; note = uridine-3'-phosphate
  modified_base 18: mod_base = OTHER; note = adenosine-3'-phosphate
  modified_base 19: mod_base = OTHER; note = uridine-3'-phosphate
  misc_feature 1..19: note = RNA
  misc_feature 20..21: note = DNA
cgttgtcccagtattctattt

SEQ ID NO: 2073 - DNA, 21 bp, synthetic construct
  source 1..21: mol_type = other DNA
  modified_base 1: mod_base = OTHER; note = cytidine-3'-phosphate
  modified_base 2: mod_base = OTHER; note = cytidine-3'-phosphate
  modified_base 3: mod_base = OTHER; note = adenosine-3'-phosphate
  modified_base 4: mod_base = OTHER; note = guanosine-3'-phosphate
  modified_base 5: mod_base = OTHER; note = uridine-3'-phosphate
  modified_base 6: mod_base = OTHER; note = adenosine-3'-phosphate
  modified_base 7: mod_base = OTHER; note = uridine-3'-phosphate
  modified_base 8: mod_base = OTHER; note = uridine-3'-phosphate
  modified_base 9: mod_base = OTHER; note = cytidine-3'-phosphate
  modified_base 10: mod_base = OTHER; note = uridine-3'-phosphate
  modified_base 11: mod_base = OTHER; note = adenosine-3'-phosphate
  modified_base 12: mod_base = OTHER; note = uridine-3'-phosphate
  modified_base 13: mod_base = OTHER; note = guanosine-3'-phosphate
  modified_base 14: mod_base = OTHER; note = uridine-3'-phosphate
  modified_base 15: mod_base = OTHER; note = uridine-3'-phosphate
  modified_base 16: mod_base = OTHER; note = uridine-3'-phosphate
  modified_base 17: mod_base = OTHER; note = uridine-3'-phosphate
  modified_base 18: mod_base = OTHER; note = uridine-3'-phosphate
  modified_base 19: mod_base = OTHER; note = cytidine-3'-phosphate
  misc_feature 1..19: note = RNA
  misc_feature 20..21: note = DNA
ccagtattctatgtttttctt

SEQ ID NO: 2074 - DNA, 21 bp, synthetic construct
  source 1..21: mol_type = other DNA
  modified_base 1: mod_base = OTHER; note = guanosine-3'-phosphate
  modified_base 2: mod_base = OTHER; note = uridine-3'-phosphate
  modified_base 3: mod_base = OTHER; note = uridine-3'-phosphate
  modified_base 4: mod_base = OTHER; note = uridine-3'-phosphate
  modified_base 5: mod_base = OTHER; note = uridine-3'-phosphate
  modified_base 6: mod_base = OTHER; note = uridine-3'-phosphate
  modified_base 7: mod_base = OTHER; note = cytidine-3'-phosphate
  modified_base 8: mod_base = OTHER; note = adenosine-3'-phosphate
  modified_base 9: mod_base = OTHER; note = cytidine-3'-phosphate
  modified_base 10: mod_base = OTHER; note = uridine-3'-phosphate
  modified_base 11: mod_base = OTHER; note = adenosine-3'-phosphate
  modified_base 12: mod_base = OTHER; note = cytidine-3'-phosphate
  modified_base 13: mod_base = OTHER; note = cytidine-3'-phosphate
  modified_base 14: mod_base = OTHER; note = uridine-3'-phosphate
  modified_base 15: mod_base = OTHER; note = guanosine-3'-phosphate
  modified_base 16: mod_base = OTHER; note = guanosine-3'-phosphate
  modified_base 17: mod_base = OTHER; note = adenosine-3'-phosphate
  modified_base 18: mod_base = OTHER; note = adenosine-3'-phosphate
  modified_base 19: mod_base = OTHER; note = adenosine-3'-phosphate
  misc_feature 1..19: note = RNA
  misc_feature 20..21: note = DNA
gtttttcactacctggaaatt

SEQ ID NO: 2075 - DNA, 21 bp, synthetic construct
  source 1..21: mol_type = other DNA
  modified_base 1: mod_base = OTHER; note = cytidine-3'-phosphate
  modified_base 2: mod_base = OTHER; note = cytidine-3'-phosphate
  modified_base 3: mod_base = OTHER; note = uridine-3'-phosphate
  modified_base 4: mod_base = OTHER; note = guanosine-3'-phosphate
  modified_base 5: mod_base = OTHER; note = guanosine-3'-phosphate
  modified_base 6: mod_base = OTHER; note = adenosine-3'-phosphate
  modified_base 7: mod_base = OTHER; note = adenosine-3'-phosphate
  modified_base 8: mod_base = OTHER; note = adenosine-3'-phosphate
  modified_base 9: mod_base = OTHER; note = cytidine-3'-phosphate
  modified_base 10: mod_base = OTHER; note = adenosine-3'-phosphate
  modified_base 11: mod_base = OTHER; note = guanosine-3'-phosphate
  modified_base 12: mod_base = OTHER; note = guanosine-3'-phosphate
  modified_base 13: mod_base = OTHER; note = adenosine-3'-phosphate
  modified_base 14: mod_base = OTHER; note = adenosine-3'-phosphate
  modified_base 15: mod_base = OTHER; note = adenosine-3'-phosphate
  modified_base 16: mod_base = OTHER; note = uridine-3'-phosphate
  modified_base 17: mod_base = OTHER; note = cytidine-3'-phosphate
  modified_base 18: mod_base = OTHER; note = adenosine-3'-phosphate
  modified_base 19: mod_base = OTHER; note = uridine-3'-phosphate
  misc_feature 1..19: note = RNA
  misc_feature 20..21: note = DNA
cctggaaacaggaaatcattt

SEQ ID NO: 2076 - DNA, 21 bp, synthetic construct
  source 1..21: mol_type = other DNA
  modified_base 1: mod_base = OTHER; note = guanosine-3'-phosphate
  modified_base 2: mod_base = OTHER; note = guanosine-3'-phosphate
  modified_base 3: mod_base = OTHER; note = adenosine-3'-phosphate
  modified_base 4: mod_base = OTHER; note = adenosine-3'-phosphate
  modified_base 5: mod_base = OTHER; note = cytidine-3'-phosphate
  modified_base 6: mod_base = OTHER; note = adenosine-3'-phosphate
  modified_base 7: mod_base = OTHER; note = uridine-3'-phosphate
  modified_base 8: mod_base = OTHER; note = uridine-3'-phosphate
  modified_base 9: mod_base = OTHER; note = uridine-3'-phosphate
  modified_base 10: mod_base = OTHER; note = uridine-3'-phosphate
  modified_base 11: mod_base = OTHER; note = uridine-3'-phosphate
  modified_base 12: mod_base = OTHER; note = cytidine-3'-phosphate
  modified_base 13: mod_base = OTHER; note = adenosine-3'-phosphate
  modified_base 14: mod_base = OTHER; note = uridine-3'-phosphate
  modified_base 15: mod_base = OTHER; note = uridine-3'-phosphate
  modified_base 16: mod_base = OTHER; note = cytidine-3'-phosphate
  modified_base 17: mod_base = OTHER; note = uridine-3'-phosphate
  modified_base 18: mod_base = OTHER; note = guanosine-3'-phosphate
  modified_base 19: mod_base = OTHER; note = adenosine-3'-phosphate
  misc_feature 1..19: note = RNA
  misc_feature 20..21: note = DNA
ggaacatttttcattctgatt

SEQ ID NO: 2077 - DNA, 21 bp, synthetic construct
  source 1..21: mol_type = other DNA
  modified_base 1: mod_base = OTHER; note = cytidine-3'-phosphate
  modified_base 2: mod_base = OTHER; note = adenosine-3'-phosphate
  modified_base 3: mod_base = OTHER; note = uridine-3'-phosphate
  modified_base 4: mod_base = OTHER; note = uridine-3'-phosphate
  modified_base 5: mod_base = OTHER; note = cytidine-3'-phosphate
  modified_base 6: mod_base = OTHER; note = uridine-3'-phosphate
  modified_base 7: mod_base = OTHER; note = guanosine-3'-phosphate
  modified_base 8: mod_base = OTHER; note = adenosine-3'-phosphate
  modified_base 9: mod_base = OTHER; note = cytidine-3'-phosphate
  modified_base 10: mod_base = OTHER; note = cytidine-3'-phosphate
  modified_base 11: mod_base = OTHER; note = cytidine-3'-phosphate
  modified_base 12: mod_base = OTHER; note = adenosine-3'-phosphate
  modified_base 13: mod_base = OTHER; note = uridine-3'-phosphate
  modified_base 14: mod_base = OTHER; note = uridine-3'-phosphate
  modified_base 15: mod_base = OTHER; note = adenosine-3'-phosphate
  modified_base 16: mod_base = OTHER; note = adenosine-3'-phosphate
  modified_base 17: mod_base = OTHER; note = uridine-3'-phosphate
  modified_base 18: mod_base = OTHER; note = uridine-3'-phosphate
  modified_base 19: mod_base = OTHER; note = guanosine-3'-phosphate
  misc_feature 1..19: note = RNA
  misc_feature 20..21: note = DNA
cattctgacccattaattgtt

SEQ ID NO: 2078 - DNA, 21 bp, synthetic construct
  source 1..21: mol_type = other DNA
  modified_base 1: mod_base = OTHER; note = cytidine-3'-phosphate
  modified_base 2: mod_base = OTHER; note = cytidine-3'-phosphate
  modified_base 3: mod_base = OTHER; note = adenosine-3'-phosphate
  modified_base 4: mod_base = OTHER; note = uridine-3'-phosphate
  modified_base 5: mod_base = OTHER; note = uridine-3'-phosphate
  modified_base 6: mod_base = OTHER; note = adenosine-3'-phosphate
  modified_base 7: mod_base = OTHER; note = adenosine-3'-phosphate
  modified_base 8: mod_base = OTHER; note = uridine-3'-phosphate
  modified_base 9: mod_base = OTHER; note = uridine-3'-phosphate
  modified_base 10: mod_base = OTHER; note = guanosine-3'-phosphate
  modified_base 11: mod_base = OTHER; note = adenosine-3'-phosphate
  modified_base 12: mod_base = OTHER; note = adenosine-3'-phosphate
  modified_base 13: mod_base = OTHER; note = adenosine-3'-phosphate
  modified_base 14: mod_base = OTHER; note = adenosine-3'-phosphate
  modified_base 15: mod_base = OTHER; note = guanosine-3'-phosphate
  modified_base 16: mod_base = OTHER; note = cytidine-3'-phosphate
  modified_base 17: mod_base = OTHER; note = adenosine-3'-phosphate
  modified_base 18: mod_base = OTHER; note = guanosine-3'-phosphate
  modified_base 19: mod_base = OTHER; note = adenosine-3'-phosphate
  misc_feature 1..19: note = RNA
  misc_feature 20..21: note = DNA
ccattaattgaaaagcagatt

SEQ ID NO: 2079 - DNA, 21 bp, synthetic construct
  source 1..21: mol_type = other DNA
  modified_base 1: mod_base = OTHER; note = adenosine-3'-phosphate
  modified_base 2: mod_base = OTHER; note = adenosine-3'-phosphate
  modified_base 3: mod_base = OTHER; note = adenosine-3'-phosphate
  modified_base 4: mod_base = OTHER; note = guanosine-3'-phosphate
  modified_base 5: mod_base = OTHER; note = cytidine-3'-phosphate
  modified_base 6: mod_base = OTHER; note = adenosine-3'-phosphate
  modified_base 7: mod_base = OTHER; note = guanosine-3'-phosphate
  modified_base 8: mod_base = OTHER; note = adenosine-3'-phosphate
  modified_base 9: mod_base = OTHER; note = adenosine-3'-phosphate
  modified_base 10: mod_base = OTHER; note = adenosine-3'-phosphate
  modified_base 11: mod_base = OTHER; note = cytidine-3'-phosphate
  modified_base 12: mod_base = OTHER; note = uridine-3'-phosphate
  modified_base 13: mod_base = OTHER; note = guanosine-3'-phosphate
  modified_base 14: mod_base = OTHER; note = adenosine-3'-phosphate
  modified_base 15: mod_base = OTHER; note = adenosine-3'-phosphate
  modified_base 16: mod_base = OTHER; note = guanosine-3'-phosphate
  modified_base 17: mod_base = OTHER; note = adenosine-3'-phosphate
  modified_base 18: mod_base = OTHER; note = adenosine-3'-phosphate
  modified_base 19: mod_base = OTHER; note = adenosine-3'-phosphate
  misc_feature 1..19: note = RNA
  misc_feature 20..21: note = DNA
aaagcagaaactgaagaaatt

SEQ ID NO: 2080 - DNA, 21 bp, synthetic construct
  source 1..21: mol_type = other DNA
  modified_base 1: mod_base = OTHER; note = adenosine-3'-phosphate
  modified_base 2: mod_base = OTHER; note = adenosine-3'-phosphate
  modified_base 3: mod_base = OTHER; note = cytidine-3'-phosphate
  modified_base 4: mod_base = OTHER; note = uridine-3'-phosphate
  modified_base 5: mod_base = OTHER; note = guanosine-3'-phosphate
  modified_base 6: mod_base = OTHER; note = adenosine-3'-phosphate
  modified_base 7: mod_base = OTHER; note = adenosine-3'-phosphate
  modified_base 8: mod_base = OTHER; note = guanosine-3'-phosphate
  modified_base 9: mod_base = OTHER; note = adenosine-3'-phosphate
  modified_base 10: mod_base = OTHER; note = adenosine-3'-phosphate
  modified_base 11: mod_base = OTHER; note = adenosine-3'-phosphate
  modified_base 12: mod_base = OTHER; note = adenosine-3'-phosphate
  modified_base 13: mod_base = OTHER; note = adenosine-3'-phosphate
  modified_base 14: mod_base = OTHER; note = adenosine-3'-phosphate
  modified_base 15: mod_base = OTHER; note = uridine-3'-phosphate
  modified_base 16: mod_base = OTHER; note = uridine-3'-phosphate
  modified_base 17: mod_base = OTHER; note = adenosine-3'-phosphate
  modified_base 18: mod_base = OTHER; note = adenosine-3'-phosphate
  modified_base 19: mod_base = OTHER; note = adenosine-3'-phosphate
  misc_feature 1..19: note = RNA
  misc_feature 20..21: note = DNA
aactgaagaaaaaattaaatt

SEQ ID NO: 2081 - DNA, 21 bp, synthetic construct
  source 1..21: mol_type = other DNA
  modified_base 1: mod_base = OTHER; note = adenosine-3'-phosphate
  modified_base 2: mod_base = OTHER; note = adenosine-3'-phosphate
  modified_base 3: mod_base = OTHER; note = adenosine-3'-phosphate
  modified_base 4: mod_base = OTHER; note = adenosine-3'-phosphate
  modified_base 5: mod_base = OTHER; note = adenosine-3'-phosphate
  modified_base 6: mod_base = OTHER; note = adenosine-3'-phosphate
  modified_base 7: mod_base = OTHER; note = uridine-3'-phosphate
  modified_base 8: mod_base = OTHER; note = uridine-3'-phosphate
  modified_base 9: mod_base = OTHER; note = adenosine-3'-phosphate
  modified_base 10: mod_base = OTHER; note = adenosine-3'-phosphate
  modified_base 11: mod_base = OTHER; note = adenosine-3'-phosphate
  modified_base 12: mod_base = OTHER; note = adenosine-3'-phosphate
  modified_base 13: mod_base = OTHER; note = guanosine-3'-phosphate
  modified_base 14: mod_base = OTHER; note = adenosine-3'-phosphate
  modified_base 15: mod_base = OTHER; note = adenosine-3'-phosphate
  modified_base 16: mod_base = OTHER; note = guanosine-3'-phosphate
  modified_base 17: mod_base = OTHER; note = guanosine-3'-phosphate
  modified_base 18: mod_base = OTHER; note = guanosine-3'-phosphate
  modified_base 19: mod_base = OTHER; note = adenosine-3'-phosphate
  misc_feature 1..19: note = RNA
  misc_feature 20..21: note = DNA
aaaaaattaaaagaagggatt

SEQ ID NO: 2082 - DNA, 21 bp, synthetic construct
  source 1..21: mol_type = other DNA
  modified_base 1: mod_base = OTHER; note = adenosine-3'-phosphate
  modified_base 2: mod_base = OTHER; note = guanosine-3'-phosphate
  modified_base 3: mod_base = OTHER; note = guanosine-3'-phosphate
  modified_base 4: mod_base = OTHER; note = guanosine-3'-phosphate
  modified_base 5: mod_base = OTHER; note = adenosine-3'-phosphate
  modified_base 6: mod_base = OTHER; note = uridine-3'-phosphate
  modified_base 7: mod_base = OTHER; note = guanosine-3'-phosphate
  modified_base 8: mod_base = OTHER; note = uridine-3'-phosphate
  modified_base 9: mod_base = OTHER; note = uridine-3'-phosphate
  modified_base 10: mod_base = OTHER; note = guanosine-3'-phosphate
  modified_base 11: mod_base = OTHER; note = adenosine-3'-phosphate
  modified_base 12: mod_base = OTHER; note = guanosine-3'-phosphate
  modified_base 13: mod_base = OTHER; note = cytidine-3'-phosphate
  modified_base 14: mod_base = OTHER; note = adenosine-3'-phosphate
  modified_base 15: mod_base = OTHER; note = uridine-3'-phosphate
  modified_base 16: mod_base = OTHER; note = uridine-3'-phosphate
  modified_base 17: mod_base = OTHER; note = adenosine-3'-phosphate
  modified_base 18: mod_base = OTHER; note = uridine-3'-phosphate
  modified_base 19: mod_base = OTHER; note = guanosine-3'-phosphate
  misc_feature 1..19: note = RNA
  misc_feature 20..21: note = DNA
agggatgttgagcattatgtt

SEQ ID NO: 2083 - DNA, 21 bp, synthetic construct
  source 1..21: mol_type = other DNA
  modified_base 1: mod_base = OTHER; note = guanosine-3'-phosphate
  modified_base 2: mod_base = OTHER; note = adenosine-3'-phosphate
  modified_base 3: mod_base = OTHER; note = guanosine-3'-phosphate
  modified_base 4: mod_base = OTHER; note = cytidine-3'-phosphate
  modified_base 5: mod_base = OTHER; note = adenosine-3'-phosphate
  modified_base 6: mod_base = OTHER; note = uridine-3'-phosphate
  modified_base 7: mod_base = OTHER; note = uridine-3'-phosphate
  modified_base 8: mod_base = OTHER; note = adenosine-3'-phosphate
  modified_base 9: mod_base = OTHER; note = uridine-3'-phosphate
  modified_base 10: mod_base = OTHER; note = guanosine-3'-phosphate
  modified_base 11: mod_base = OTHER; note = uridine-3'-phosphate
  modified_base 12: mod_base = OTHER; note = cytidine-3'-phosphate
  modified_base 13: mod_base = OTHER; note = cytidine-3'-phosphate
  modified_base 14: mod_base = OTHER; note = uridine-3'-phosphate
  modified_base 15: mod_base = OTHER; note = adenosine-3'-phosphate
  modified_base 16: mod_base = OTHER; note = cytidine-3'-phosphate
  modified_base 17: mod_base = OTHER; note = adenosine-3'-phosphate
  modified_base 18: mod_base = OTHER; note = guanosine-3'-phosphate
  modified_base 19: mod_base = OTHER; note = adenosine-3'-phosphate
  misc_feature 1..19: note = RNA
  misc_feature 20..21: note = DNA
gagcattatgtcctacagatt

SEQ ID NO: 2084 - DNA, 21 bp, synthetic construct
  source 1..21: mol_type = other DNA
  modified_base 1: mod_base = OTHER; note = uridine-3'-phosphate
  modified_base 2: mod_base = OTHER; note = guanosine-3'-phosphate
  modified_base 3: mod_base = OTHER; note = uridine-3'-phosphate
  modified_base 4: mod_base = OTHER; note = cytidine-3'-phosphate
  modified_base 5: mod_base = OTHER; note = cytidine-3'-phosphate
  modified_base 6: mod_base = OTHER; note = uridine-3'-phosphate
  modified_base 7: mod_base = OTHER; note = adenosine-3'-phosphate
  modified_base 8: mod_base = OTHER; note = cytidine-3'-phosphate
  modified_base 9: mod_base = OTHER; note = adenosine-3'-phosphate
  modified_base 10: mod_base = OTHER; note = guanosine-3'-phosphate
  modified_base 11: mod_base = OTHER; note = adenosine-3'-phosphate
  modified_base 12: mod_base = OTHER; note = adenosine-3'-phosphate
  modified_base 13: mod_base = OTHER; note = adenosine-3'-phosphate
  modified_base 14: mod_base = OTHER; note = uridine-3'-phosphate
  modified_base 15: mod_base = OTHER; note = guanosine-3'-phosphate
  modified_base 16: mod_base = OTHER; note = cytidine-3'-phosphate
  modified_base 17: mod_base = OTHER; note = uridine-3'-phosphate
  modified_base 18: mod_base = OTHER; note = guanosine-3'-phosphate
  modified_base 19: mod_base = OTHER; note = adenosine-3'-phosphate
  misc_feature 1..19: note = RNA
  misc_feature 20..21: note = DNA
tgtcctacagaaatgctgatt

SEQ ID NO: 2085 - DNA, 21 bp, synthetic construct
  source 1..21: mol_type = other DNA
  modified_base 1: mod_base = OTHER; note = adenosine-3'-phosphate
  modified_base 2: mod_base = OTHER; note = adenosine-3'-phosphate
  modified_base 3: mod_base = OTHER; note = uridine-3'-phosphate
  modified_base 4: mod_base = OTHER; note = guanosine-3'-phosphate
  modified_base 5: mod_base = OTHER; note = cytidine-3'-phosphate
  modified_base 6: mod_base = OTHER; note = uridine-3'-phosphate
  modified_base 7: mod_base = OTHER; note = guanosine-3'-phosphate
  modified_base 8: mod_base = OTHER; note = adenosine-3'-phosphate
  modified_base 9: mod_base = OTHER; note = cytidine-3'-phosphate
  modified_base 10: mod_base = OTHER; note = uridine-3'-phosphate
  modified_base 11: mod_base = OTHER; note = adenosine-3'-phosphate
  modified_base 12: mod_base = OTHER; note = cytidine-3'-phosphate
  modified_base 13: mod_base = OTHER; note = uridine-3'-phosphate
  modified_base 14: mod_base = OTHER; note = cytidine-3'-phosphate
  modified_base 15: mod_base = OTHER; note = uridine-3'-phosphate
  modified_base 16: mod_base = OTHER; note = uridine-3'-phosphate
  modified_base 17: mod_base = OTHER; note = adenosine-3'-phosphate
  modified_base 18: mod_base = OTHER; note = cytidine-3'-phosphate
  modified_base 19: mod_base = OTHER; note = adenosine-3'-phosphate
  misc_feature 1..19: note = RNA
  misc_feature 20..21: note = DNA
aatgctgactactcttacatt

SEQ ID NO: 2086 - DNA, 21 bp, synthetic construct
  source 1..21: mol_type = other DNA
  modified_base 1: mod_base = OTHER; note = uridine-3'-phosphate
  modified_base 2: mod_base = OTHER; note = adenosine-3'-phosphate
  modified_base 3: mod_base = OTHER; note = cytidine-3'-phosphate
  modified_base 4: mod_base = OTHER; note = uridine-3'-phosphate
  modified_base 5: mod_base = OTHER; note = cytidine-3'-phosphate
  modified_base 6: mod_base = OTHER; note = uridine-3'-phosphate
  modified_base 7: mod_base = OTHER; note = uridine-3'-phosphate
  modified_base 8: mod_base = OTHER; note = adenosine-3'-phosphate
  modified_base 9: mod_base = OTHER; note = cytidine-3'-phosphate
  modified_base 10: mod_base = OTHER; note = adenosine-3'-phosphate
  modified_base 11: mod_base = OTHER; note = guanosine-3'-phosphate
  modified_base 12: mod_base = OTHER; note = uridine-3'-phosphate
  modified_base 13: mod_base = OTHER; note = guanosine-3'-phosphate
  modified_base 14: mod_base = OTHER; note = uridine-3'-phosphate
  modified_base 15: mod_base = OTHER; note = guanosine-3'-phosphate
  modified_base 16: mod_base = OTHER; note = uridine-3'-phosphate
  modified_base 17: mod_base = OTHER; note = guanosine-3'-phosphate
  modified_base 18: mod_base = OTHER; note = guanosine-3'-phosphate
  modified_base 19: mod_base = OTHER; note = adenosine-3'-phosphate
  misc_feature 1..19: note = RNA
  misc_feature 20..21: note = DNA
tactcttacagtgtgtggatt

SEQ ID NO: 2087 - DNA, 21 bp, synthetic construct
  source 1..21: mol_type = other DNA
  modified_base 1: mod_base = OTHER; note = adenosine-3'-phosphate
  modified_base 2: mod_base = OTHER; note = guanosine-3'-phosphate
  modified_base 3: mod_base = OTHER; note = uridine-3'-phosphate
  modified_base 4: mod_base = OTHER; note = guanosine-3'-phosphate
  modified_base 5: mod_base = OTHER; note = uridine-3'-phosphate
  modified_base 6: mod_base = OTHER; note = guanosine-3'-phosphate
  modified_base 7: mod_base = OTHER; note = uridine-3'-phosphate
  modified_base 8: mod_base = OTHER; note = guanosine-3'-phosphate
  modified_base 9: mod_base = OTHER; note = guanosine-3'-phosphate
  modified_base 10: mod_base = OTHER; note = adenosine-3'-phosphate
  modified_base 11: mod_base = OTHER; note = adenosine-3'-phosphate
  modified_base 12: mod_base = OTHER; note = guanosine-3'-phosphate
  modified_base 13: mod_base = OTHER; note = guanosine-3'-phosphate
  modified_base 14: mod_base = OTHER; note = guanosine-3'-phosphate
  modified_base 15: mod_base = OTHER; note = uridine-3'-phosphate
  modified_base 16: mod_base = OTHER; note = guanosine-3'-phosphate
  modified_base 17: mod_base = OTHER; note = guanosine-3'-phosphate
  modified_base 18: mod_base = OTHER; note = adenosine-3'-phosphate
  modified_base 19: mod_base = OTHER; note = adenosine-3'-phosphate
  misc_feature 1..19: note = RNA
  misc_feature 20..21: note = DNA
agtgtgtggaagggtggaatt

SEQ ID NO: 2088 - DNA, 21 bp, synthetic construct
  source 1..21: mol_type = other DNA
  modified_base 1: mod_base = OTHER; note = guanosine-3'-phosphate
  modified_base 2: mod_base = OTHER; note = guanosine-3'-phosphate
  modified_base 3: mod_base = OTHER; note = guanosine-3'-phosphate
  modified_base 4: mod_base = OTHER; note = uridine-3'-phosphate
  modified_base 5: mod_base = OTHER; note = guanosine-3'-phosphate
  modified_base 6: mod_base = OTHER; note = guanosine-3'-phosphate
  modified_base 7: mod_base = OTHER; note = adenosine-3'-phosphate
  modified_base 8: mod_base = OTHER; note = adenosine-3'-phosphate
  modified_base 9: mod_base = OTHER; note = guanosine-3'-phosphate
  modified_base 10: mod_base = OTHER; note = uridine-3'-phosphate
  modified_base 11: mod_base = OTHER; note = guanosine-3'-phosphate
  modified_base 12: mod_base = OTHER; note = cytidine-3'-phosphate
  modified_base 13: mod_base = OTHER; note = uridine-3'-phosphate
  modified_base 14: mod_base = OTHER; note = adenosine-3'-phosphate
  modified_base 15: mod_base = OTHER; note = guanosine-3'-phosphate
  modified_base 16: mod_base = OTHER; note = cytidine-3'-phosphate
  modified_base 17: mod_base = OTHER; note = adenosine-3'-phosphate
  modified_base 18: mod_base = OTHER; note = cytidine-3'-phosphate
  modified_base 19: mod_base = OTHER; note = uridine-3'-phosphate
  misc_feature 1..19: note = RNA
  misc_feature 20..21: note = DNA
gggtggaagtgctagcacttt

SEQ ID NO: 2089 - DNA, 21 bp, synthetic construct
  source 1..21: mol_type = other DNA
  modified_base 1: mod_base = OTHER; note = guanosine-3'-phosphate
  modified_base 2: mod_base = OTHER; note = cytidine-3'-phosphate
  modified_base 3: mod_base = OTHER; note = uridine-3'-phosphate
  modified_base 4: mod_base = OTHER; note = adenosine-3'-phosphate
  modified_base 5: mod_base = OTHER; note = guanosine-3'-phosphate
  modified_base 6: mod_base = OTHER; note = cytidine-3'-phosphate
  modified_base 7: mod_base = OTHER; note = adenosine-3'-phosphate
  modified_base 8: mod_base = OTHER; note = cytidine-3'-phosphate
  modified_base 9: mod_base = OTHER; note = uridine-3'-phosphate
  modified_base 10: mod_base = OTHER; note = uridine-3'-phosphate
  modified_base 11: mod_base = OTHER; note = guanosine-3'-phosphate
  modified_base 12: mod_base = OTHER; note = guanosine-3'-phosphate
  modified_base 13: mod_base = OTHER; note = uridine-3'-phosphate
  modified_base 14: mod_base = OTHER; note = uridine-3'-phosphate
  modified_base 15: mod_base = OTHER; note = adenosine-3'-phosphate
  modified_base 16: mod_base = OTHER; note = adenosine-3'-phosphate
  modified_base 17: mod_base = OTHER; note = cytidine-3'-phosphate
  modified_base 18: mod_base = OTHER; note = adenosine-3'-phosphate
  modified_base 19: mod_base = OTHER; note = guanosine-3'-phosphate
  misc_feature 1..19: note = RNA
  misc_feature 20..21: note = DNA
gctagcacttggttaacagtt

SEQ ID NO: 2090 - DNA, 21 bp, synthetic construct
  source 1..21: mol_type = other DNA
  modified_base 1: mod_base = OTHER; note = guanosine-3'-phosphate
  modified_base 2: mod_base = OTHER; note = guanosine-3'-phosphate
  modified_base 3: mod_base = OTHER; note = uridine-3'-phosphate
  modified_base 4: mod_base = OTHER; note = uridine-3'-phosphate
  modified_base 5: mod_base = OTHER; note = adenosine-3'-phosphate
  modified_base 6: mod_base = OTHER; note = adenosine-3'-phosphate
  modified_base 7: mod_base = OTHER; note = cytidine-3'-phosphate
  modified_base 8: mod_base = OTHER; note = adenosine-3'-phosphate
  modified_base 9: mod_base = OTHER; note = guanosine-3'-phosphate
  modified_base 10: mod_base = OTHER; note = cytidine-3'-phosphate
  modified_base 11: mod_base = OTHER; note = uridine-3'-phosphate
  modified_base 12: mod_base = OTHER; note = uridine-3'-phosphate
  modified_base 13: mod_base = OTHER; note = uridine-3'-phosphate
  modified_base 14: mod_base = OTHER; note = uridine-3'-phosphate
  modified_base 15: mod_base = OTHER; note = guanosine-3'-phosphate
  modified_base 16: mod_base = OTHER; note = cytidine-3'-phosphate
  modified_base 17: mod_base = OTHER; note = uridine-3'-phosphate
  modified_base 18: mod_base = OTHER; note = uridine-3'-phosphate
  modified_base 19: mod_base = OTHER; note = uridine-3'-phosphate
  misc_feature 1..19: note = RNA
  misc_feature 20..21: note = DNA
ggttaacagcttttgcttttt

SEQ ID NO: 2091 - DNA, 21 bp, synthetic construct
  source 1..21: mol_type = other DNA
  modified_base 1: mod_base = OTHER; note = uridine-3'-phosphate
  modified_base 2: mod_base = OTHER; note = guanosine-3'-phosphate
  modified_base 3: mod_base = OTHER; note = cytidine-3'-phosphate
  modified_base 4: mod_base = OTHER; note = uridine-3'-phosphate
  modified_base 5: mod_base = OTHER; note = uridine-3'-phosphate
  modified_base 6: mod_base = OTHER; note = uridine-3'-phosphate
  modified_base 7: mod_base = OTHER; note = adenosine-3'-phosphate
  modified_base 8: mod_base = OTHER; note = adenosine-3'-phosphate
  modified_base 9: mod_base = OTHER; note = guanosine-3'-phosphate
  modified_base 10: mod_base = OTHER; note = adenosine-3'-phosphate
  modified_base 11: mod_base = OTHER; note = guanosine-3'-phosphate
  modified_base 12: mod_base = OTHER; note = uridine-3'-phosphate
  modified_base 13: mod_base = OTHER; note = adenosine-3'-phosphate
  modified_base 14: mod_base = OTHER; note = cytidine-3'-phosphate
  modified_base 15: mod_base = OTHER; note = uridine-3'-phosphate
  modified_base 16: mod_base = OTHER; note = uridine-3'-phosphate
  modified_base 17: mod_base = OTHER; note = guanosine-3'-phosphate
  modified_base 18: mod_base = OTHER; note = guanosine-3'-phosphate
  modified_base 19: mod_base = OTHER; note = adenosine-3'-phosphate
  misc_feature 1..19: note = RNA
  misc_feature 20..21: note = DNA
tgctttaagagtacttggatt

SEQ ID NO: 2092 - DNA, 21 bp, synthetic construct
  source 1..21: mol_type = other DNA
  modified_base 1: mod_base = OTHER; note = guanosine-3'-phosphate
  modified_base 2: mod_base = OTHER; note = uridine-3'-phosphate
  modified_base 3: mod_base = OTHER; note = adenosine-3'-phosphate
  modified_base 4: mod_base = OTHER; note = cytidine-3'-phosphate
  modified_base 5: mod_base = OTHER; note = uridine-3'-phosphate
  modified_base 6: mod_base = OTHER; note = uridine-3'-phosphate
  modified_base 7: mod_base = OTHER; note = guanosine-3'-phosphate
  modified_base 8: mod_base = OTHER; note = guanosine-3'-phosphate
  modified_base 9: mod_base = OTHER; note = adenosine-3'-phosphate
  modified_base 10: mod_base = OTHER; note = cytidine-3'-phosphate
  modified_base 11: mod_base = OTHER; note = adenosine-3'-phosphate
  modified_base 12: mod_base = OTHER; note = adenosine-3'-phosphate
  modified_base 13: mod_base = OTHER; note = guanosine-3'-phosphate
  modified_base 14: mod_base = OTHER; note = uridine-3'-phosphate
  modified_base 15: mod_base = OTHER; note = adenosine-3'-phosphate
  modified_base 16: mod_base = OTHER; note = adenosine-3'-phosphate
  modified_base 17: mod_base = OTHER; note = adenosine-3'-phosphate
  modified_base 18: mod_base = OTHER; note = uridine-3'-phosphate
  modified_base 19: mod_base = OTHER; note = adenosine-3'-phosphate
  misc_feature 1..19: note = RNA
  misc_feature 20..21: note = DNA
gtacttggacaagtaaatatt

SEQ ID NO: 2093 - DNA, 21 bp, synthetic construct
  source 1..21: mol_type = other DNA
  modified_base 1: mod_base = OTHER; note = cytidine-3'-phosphate
  modified_base 2: mod_base = OTHER; note = adenosine-3'-phosphate
  modified_base 3: mod_base = OTHER; note = adenosine-3'-phosphate
  modified_base 4: mod_base = OTHER; note = guanosine-3'-phosphate
  modified_base 5: mod_base = OTHER; note = uridine-3'-phosphate
  modified_base 6: mod_base = OTHER; note = adenosine-3'-phosphate
  modified_base 7: mod_base = OTHER; note = adenosine-3'-phosphate
  modified_base 8: mod_base = OTHER; note = adenosine-3'-phosphate
  modified_base 9: mod_base = OTHER; note = uridine-3'-phosphate
  modified_base 10: mod_base = OTHER; note = adenosine-3'-phosphate
  modified_base 11: mod_base = OTHER; note = adenosine-3'-phosphate
  modified_base 12: mod_base = OTHER; note = adenosine-3'-phosphate
  modified_base 13: mod_base = OTHER; note = uridine-3'-phosphate
  modified_base 14: mod_base = OTHER; note = adenosine-3'-phosphate
  modified_base 15: mod_base = OTHER; note = cytidine-3'-phosphate
  modified_base 16: mod_base = OTHER; note = guanosine-3'-phosphate
  modified_base 17: mod_base = OTHER; note = uridine-3'-phosphate
  modified_base 18: mod_base = OTHER; note = adenosine-3'-phosphate
  modified_base 19: mod_base = OTHER; note = guanosine-3'-phosphate
  misc_feature 1..19: note = RNA
  misc_feature 20..21: note = DNA
caagtaaataaatacgtagtt

SEQ ID NO: 2094 - DNA, 21 bp, synthetic construct
  source 1..21: mol_type = other DNA
  modified_base 1: mod_base = OTHER; note = adenosine-3'-phosphate
  modified_base 2: mod_base = OTHER; note = uridine-3'-phosphate
  modified_base 3: mod_base = OTHER; note = adenosine-3'-phosphate
  modified_base 4: mod_base = OTHER; note = adenosine-3'-phosphate
  modified_base 5: mod_base = OTHER; note = adenosine-3'-phosphate
  modified_base 6: mod_base = OTHER; note = uridine-3'-phosphate
  modified_base 7: mod_base = OTHER; note = adenosine-3'-phosphate
  modified_base 8: mod_base = OTHER; note = cytidine-3'-phosphate
  modified_base 9: mod_base = OTHER; note = guanosine-3'-phosphate
  modified_base 10: mod_base = OTHER; note = uridine-3'-phosphate
  modified_base 11: mod_base = OTHER; note = adenosine-3'-phosphate
  modified_base 12: mod_base = OTHER; note = guanosine-3'-phosphate
  modified_base 13: mod_base = OTHER; note = adenosine-3'-phosphate
  modified_base 14: mod_base = OTHER; note = guanosine-3'-phosphate
  modified_base 15: mod_base = OTHER; note = cytidine-3'-phosphate
  modified_base 16: mod_base = OTHER; note = adenosine-3'-phosphate
  modified_base 17: mod_base = OTHER; note = guanosine-3'-phosphate
  modified_base 18: mod_base = OTHER; note = adenosine-3'-phosphate
  modified_base 19: mod_base = OTHER; note = adenosine-3'-phosphate
  misc_feature 1..19: note = RNA
  misc_feature 20..21: note = DNA
ataaatacgtagagcagaatt

SEQ ID NO: 2095 - DNA, 21 bp, synthetic construct
  source 1..21: mol_type = other DNA
  modified_base 1: mod_base = OTHER; note = guanosine-3'-phosphate
  modified_base 2: mod_base = OTHER; note = adenosine-3'-phosphate
  modified_base 3: mod_base = OTHER; note = guanosine-3'-phosphate
  modified_base 4: mod_base = OTHER; note = cytidine-3'-phosphate
  modified_base 5: mod_base = OTHER; note = adenosine-3'-phosphate
  modified_base 6: mod_base = OTHER; note = guanosine-3'-phosphate
  modified_base 7: mod_base = OTHER; note = adenosine-3'-phosphate
  modified_base 8: mod_base = OTHER; note = adenosine-3'-phosphate
  modified_base 9: mod_base = OTHER; note = cytidine-3'-phosphate
  modified_base 10: mod_base = OTHER; note = cytidine-3'-phosphate
  modified_base 11: mod_base = OTHER; note = adenosine-3'-phosphate
  modified_base 12: mod_base = OTHER; note = adenosine-3'-phosphate
  modified_base 13: mod_base = OTHER; note = adenosine-3'-phosphate
  modified_base 14: mod_base = OTHER; note = adenosine-3'-phosphate
  modified_base 15: mod_base = OTHER; note = uridine-3'-phosphate
  modified_base 16: mod_base = OTHER; note = uridine-3'-phosphate
  modified_base 17: mod_base = OTHER; note = cytidine-3'-phosphate
  modified_base 18: mod_base = OTHER; note = adenosine-3'-phosphate
  modified_base 19: mod_base = OTHER; note = adenosine-3'-phosphate
  misc_feature 1..19: note = RNA
  misc_feature 20..21: note = DNA
gagcagaaccaaaattcaatt

SEQ ID NO: 2096 - DNA, 21 bp, synthetic construct
  source 1..21: mol_type = other DNA
  modified_base 1: mod_base = OTHER; note = adenosine-3'-phosphate
  modified_base 2: mod_base = OTHER; note = adenosine-3'-phosphate
  modified_base 3: mod_base = OTHER; note = uridine-3'-phosphate
  modified_base 4: mod_base = OTHER; note = uridine-3'-phosphate
  modified_base 5: mod_base = OTHER; note = cytidine-3'-phosphate
  modified_base 6: mod_base = OTHER; note = adenosine-3'-phosphate
  modified_base 7: mod_base = OTHER; note = adenosine-3'-phosphate
  modified_base 8: mod_base = OTHER; note = uridine-3'-phosphate
  modified_base 9: mod_base = OTHER; note = uridine-3'-phosphate
  modified_base 10: mod_base = OTHER; note = uridine-3'-phosphate
  modified_base 11: mod_base = OTHER; note = guanosine-3'-phosphate
  modified_base 12: mod_base = OTHER; note = uridine-3'-phosphate
  modified_base 13: mod_base = OTHER; note = adenosine-3'-phosphate
  modified_base 14: mod_base = OTHER; note = adenosine-3'-phosphate
  modified_base 15: mod_base = OTHER; note = uridine-3'-phosphate
  modified_base 16: mod_base = OTHER; note = uridine-3'-phosphate
  modified_base 17: mod_base = OTHER; note = cytidine-3'-phosphate
  modified_base 18: mod_base = OTHER; note = uridine-3'-phosphate
  modified_base 19: mod_base = OTHER; note = uridine-3'-phosphate
  misc_feature 1..19: note = RNA
  misc_feature 20..21: note = DNA
aattcaatttgtaattctttt

SEQ ID NO: 2097 - DNA, 21 bp, synthetic construct
  source 1..21: mol_type = other DNA
  modified_base 1: mod_base = OTHER; note = guanosine-3'-phosphate
  modified_base 2: mod_base = OTHER; note = uridine-3'-phosphate
  modified_base 3: mod_base = OTHER; note = adenosine-3'-phosphate
  modified_base 4: mod_base = OTHER; note = adenosine-3'-phosphate
  modified_base 5: mod_base = OTHER; note = uridine-3'-phosphate
  modified_base 6: mod_base = OTHER; note = uridine-3'-phosphate
  modified_base 7: mod_base = OTHER; note = cytidine-3'-phosphate
  modified_base 8: mod_base = OTHER; note = uridine-3'-phosphate
  modified_base 9: mod_base = OTHER; note = uridine-3'-phosphate
  modified_base 10: mod_base = OTHER; note = uridine-3'-phosphate
  modified_base 11: mod_base = OTHER; note = adenosine-3'-phosphate
  modified_base 12: mod_base = OTHER; note = uridine-3'-phosphate
  modified_base 13: mod_base = OTHER; note = uridine-3'-phosphate
  modified_base 14: mod_base = OTHER; note = guanosine-3'-phosphate
  modified_base 15: mod_base = OTHER; note = uridine-3'-phosphate
  modified_base 16: mod_base = OTHER; note = guanosine-3'-phosphate
  modified_base 17: mod_base = OTHER; note = guanosine-3'-phosphate
  modified_base 18: mod_base = OTHER; note = cytidine-3'-phosphate
  modified_base 19: mod_base = OTHER; note = uridine-3'-phosphate
  misc_feature 1..19: note = RNA
  misc_feature 20..21: note = DNA
gtaattctttattgtggcttt

SEQ ID NO: 2098 - DNA, 21 bp, synthetic construct
  source 1..21: mol_type = other DNA
  modified_base 1: mod_base = OTHER; note = adenosine-3'-phosphate
  modified_base 2: mod_base = OTHER; note = uridine-3'-phosphate
  modified_base 3: mod_base = OTHER; note = uridine-3'-phosphate
  modified_base 4: mod_base = OTHER; note = guanosine-3'-phosphate
  modified_base 5: mod_base = OTHER; note = uridine-3'-phosphate
  modified_base 6: mod_base = OTHER; note = guanosine-3'-phosphate
  modified_base 7: mod_base = OTHER; note = guanosine-3'-phosphate
  modified_base 8: mod_base = OTHER; note = cytidine-3'-phosphate
  modified_base 9: mod_base = OTHER; note = uridine-3'-phosphate
  modified_base 10: mod_base = OTHER; note = adenosine-3'-phosphate
  modified_base 11: mod_base = OTHER; note = guanosine-3'-phosphate
  modified_base 12: mod_base = OTHER; note = uridine-3'-phosphate
  modified_base 13: mod_base = OTHER; note = uridine-3'-phosphate
  modified_base 14: mod_base = OTHER; note = guanosine-3'-phosphate
  modified_base 15: mod_base = OTHER; note = adenosine-3'-phosphate
  modified_base 16: mod_base = OTHER; note = guanosine-3'-phosphate
  modified_base 17: mod_base = OTHER; note = adenosine-3'-phosphate
  modified_base 18: mod_base = OTHER; note = adenosine-3'-phosphate
  modified_base 19: mod_base = OTHER; note = uridine-3'-phosphate
  misc_feature 1..19: note = RNA
  misc_feature 20..21: note = DNA
attgtggctagttgagaattt

SEQ ID NO: 2099 - DNA, 21 bp, synthetic construct
  source 1..21: mol_type = other DNA
  modified_base 1: mod_base = OTHER; note = cytidine-3'-phosphate
  modified_base 2: mod_base = OTHER; note = uridine-3'-phosphate
  modified_base 3: mod_base = OTHER; note = adenosine-3'-phosphate
  modified_base 4: mod_base = OTHER; note = guanosine-3'-phosphate
  modified_base 5: mod_base = OTHER; note = uridine-3'-phosphate
  modified_base 6: mod_base = OTHER; note = uridine-3'-phosphate
  modified_base 7: mod_base = OTHER; note = guanosine-3'-phosphate
  modified_base 8: mod_base = OTHER; note = adenosine-3'-phosphate
  modified_base 9: mod_base = OTHER; note = guanosine-3'-phosphate
  modified_base 10: mod_base = OTHER; note = adenosine-3'-phosphate
  modified_base 11: mod_base = OTHER; note = adenosine-3'-phosphate
  modified_base 12: mod_base = OTHER; note = uridine-3'-phosphate
  modified_base 13: mod_base = OTHER; note = uridine-3'-phosphate
  modified_base 14: mod_base = OTHER; note = adenosine-3'-phosphate
  modified_base 15: mod_base = OTHER; note = uridine-3'-phosphate
  modified_base 16: mod_base = OTHER; note = cytidine-3'-phosphate
  modified_base 17: mod_base = OTHER; note = adenosine-3'-phosphate
  modified_base 18: mod_base = OTHER; note = adenosine-3'-phosphate
  modified_base 19: mod_base = OTHER; note = uridine-3'-phosphate
  misc_feature 1..19: note = RNA
  misc_feature 20..21: note = DNA
ctagttgagaattatcaattt

SEQ ID NO: 2100 - DNA, 21 bp, synthetic construct
  source 1..21: mol_type = other DNA
  modified_base 1: mod_base = OTHER; note = uridine-3'-phosphate
  modified_base 2: mod_base = OTHER; note = uridine-3'-phosphate
  modified_base 3: mod_base = OTHER; note = adenosine-3'-phosphate
  modified_base 4: mod_base = OTHER; note = uridine-3'-phosphate
  modified_base 5: mod_base = OTHER; note = cytidine-3'-phosphate
  modified_base 6: mod_base = OTHER; note = adenosine-3'-phosphate
  modified_base 7: mod_base = OTHER; note = adenosine-3'-phosphate
  modified_base 8: mod_base = OTHER; note = uridine-3'-phosphate
  modified_base 9: mod_base = OTHER; note = uridine-3'-phosphate
  modified_base 10: mod_base = OTHER; note = adenosine-3'-phosphate
  modified_base 11: mod_base = OTHER; note = guanosine-3'-phosphate
  modified_base 12: mod_base = OTHER; note = adenosine-3'-phosphate
  modified_base 13: mod_base = OTHER; note = uridine-3'-phosphate
  modified_base 14: mod_base = OTHER; note = adenosine-3'-phosphate
  modified_base 15: mod_base = OTHER; note = adenosine-3'-phosphate
  modified_base 16: mod_base = OTHER; note = uridine-3'-phosphate
  modified_base 17: mod_base = OTHER; note = guanosine-3'-phosphate
  modified_base 18: mod_base = OTHER; note = guanosine-3'-phosphate
  modified_base 19: mod_base = OTHER; note = adenosine-3'-phosphate
  misc_feature 1..19: note = RNA
  misc_feature 20..21: note = DNA
ttatcaattagataatggatt

SEQ ID NO: 2101 - DNA, 21 bp, synthetic construct
  source 1..21: mol_type = other DNA
  modified_base 1: mod_base = OTHER; note = adenosine-3'-phosphate
  modified_base 2: mod_base = OTHER; note = adenosine-3'-phosphate
  modified_base 3: mod_base = OTHER; note = uridine-3'-phosphate
  modified_base 4: mod_base = OTHER; note = guanosine-3'-phosphate
  modified_base 5: mod_base = OTHER; note = guanosine-3'-phosphate
  modified_base 6: mod_base = OTHER; note = adenosine-3'-phosphate
  modified_base 7: mod_base = OTHER; note = uridine-3'-phosphate
  modified_base 8: mod_base = OTHER; note = cytidine-3'-phosphate
  modified_base 9: mod_base = OTHER; note = uridine-3'-phosphate
  modified_base 10: mod_base = OTHER; note = uridine-3'-phosphate
  modified_base 11: mod_base = OTHER; note = uridine-3'-phosphate
  modified_base 12: mod_base = OTHER; note = cytidine-3'-phosphate
  modified_base 13: mod_base = OTHER; note = adenosine-3'-phosphate
  modified_base 14: mod_base = OTHER; note = adenosine-3'-phosphate
  modified_base 15: mod_base = OTHER; note = guanosine-3'-phosphate
  modified_base 16: mod_base = OTHER; note = guanosine-3'-phosphate
  modified_base 17: mod_base = OTHER; note = adenosine-3'-phosphate
  modified_base 18: mod_base = OTHER; note = adenosine-3'-phosphate
  modified_base 19: mod_base = OTHER; note = adenosine-3'-phosphate
  misc_feature 1..19: note = RNA
  misc_feature 20..21: note = DNA
aatggatctttcaaggaaatt

SEQ ID NO: 2102 - DNA, 21 bp, synthetic construct
  source 1..21: mol_type = other DNA
  modified_base 1: mod_base = OTHER; note = cytidine-3'-phosphate
  modified_base 2: mod_base = OTHER; note = uridine-3'-phosphate
  modified_base 3: mod_base = OTHER; note = uridine-3'-phosphate
  modified_base 4: mod_base = OTHER; note = uridine-3'-phosphate
  modified_base 5: mod_base = OTHER; note = cytidine-3'-phosphate
  modified_base 6: mod_base = OTHER; note = adenosine-3'-phosphate
  modified_base 7: mod_base = OTHER; note = adenosine-3'-phosphate
  modified_base 8: mod_base = OTHER; note = guanosine-3'-phosphate
  modified_base 9: mod_base = OTHER; note = guanosine-3'-phosphate
  modified_base 10: mod_base = OTHER; note = adenosine-3'-phosphate
  modified_base 11: mod_base = OTHER; note = adenosine-3'-phosphate
  modified_base 12: mod_base = OTHER; note = adenosine-3'-phosphate
  modified_base 13: mod_base = OTHER; note = adenosine-3'-phosphate
  modified_base 14: mod_base = OTHER; note = uridine-3'-phosphate
  modified_base 15: mod_base = OTHER; note = uridine-3'-phosphate
  modified_base 16: mod_base = OTHER; note = cytidine-3'-phosphate
  modified_base 17: mod_base = OTHER; note = adenosine-3'-phosphate
  modified_base 18: mod_base = OTHER; note = cytidine-3'-phosphate
  modified_base 19: mod_base = OTHER; note = adenosine-3'-phosphate
  misc_feature 1..19: note = RNA
  misc_feature 20..21: note = DNA
ctttcaaggaaaattcacatt

SEQ ID NO: 2103 - DNA, 21 bp, synthetic construct
  source 1..21: mol_type = other DNA
  modified_base 1: mod_base = OTHER; note = adenosine-3'-phosphate
  modified_base 2: mod_base = OTHER; note = adenosine-3'-phosphate
  modified_base 3: mod_base = OTHER; note = uridine-3'-phosphate
  modified_base 4: mod_base = OTHER; note = uridine-3'-phosphate
  modified_base 5: mod_base = OTHER; note = cytidine-3'-phosphate
  modified_base 6: mod_base = OTHER; note = adenosine-3'-phosphate
  modified_base 7: mod_base = OTHER; note = cytidine-3'-phosphate
  modified_base 8: mod_base = OTHER; note = adenosine-3'-phosphate
  modified_base 9: mod_base = OTHER; note = guanosine-3'-phosphate
  modified_base 10: mod_base = OTHER; note = uridine-3'-phosphate
  modified_base 11: mod_base = OTHER; note = adenosine-3'-phosphate
  modified_base 12: mod_base = OTHER; note = uridine-3'-phosphate
  modified_base 13: mod_base = OTHER; note = cytidine-3'-phosphate
  modified_base 14: mod_base = OTHER; note = adenosine-3'-phosphate
  modified_base 15: mod_base = OTHER; note = adenosine-3'-phosphate
  modified_base 16: mod_base = OTHER; note = cytidine-3'-phosphate
  modified_base 17: mod_base = OTHER; note = cytidine-3'-phosphate
  modified_base 18: mod_base = OTHER; note = adenosine-3'-phosphate
  modified_base 19: mod_base = OTHER; note = adenosine-3'-phosphate
  misc_feature 1..19: note = RNA
  misc_feature 20..21: note = DNA
aattcacagtatcaaccaatt

SEQ ID NO: 2104 - DNA, 21 bp, synthetic construct
  source 1..21: mol_type = other DNA
  modified_base 1: mod_base = OTHER; note = guanosine-3'-phosphate
  modified_base 2: mod_base = OTHER; note = uridine-3'-phosphate
  modified_base 3: mod_base = OTHER; note = adenosine-3'-phosphate
  modified_base 4: mod_base = OTHER; note = uridine-3'-phosphate
  modified_base 5: mod_base = OTHER; note = cytidine-3'-phosphate
  modified_base 6: mod_base = OTHER; note = adenosine-3'-phosphate
  modified_base 7: mod_base = OTHER; note = adenosine-3'-phosphate
  modified_base 8: mod_base = OTHER; note = cytidine-3'-phosphate
  modified_base 9: mod_base = OTHER; note = cytidine-3'-phosphate
  modified_base 10: mod_base = OTHER; note = adenosine-3'-phosphate
  modified_base 11: mod_base = OTHER; note = adenosine-3'-phosphate
  modified_base 12: mod_base = OTHER; note = uridine-3'-phosphate
  modified_base 13: mod_base = OTHER; note = adenosine-3'-phosphate
  modified_base 14: mod_base = OTHER; note = adenosine-3'-phosphate
  modified_base 15: mod_base = OTHER; note = adenosine-3'-phosphate
  modified_base 16: mod_base = OTHER; note = adenosine-3'-phosphate
  modified_base 17: mod_base = OTHER; note = uridine-3'-phosphate
  modified_base 18: mod_base = OTHER; note = uridine-3'-phosphate
  modified_base 19: mod_base = OTHER; note = adenosine-3'-phosphate
  misc_feature 1..19: note = RNA
  misc_feature 20..21: note = DNA
gtatcaaccaataaaattatt

SEQ ID NO: 2105 - DNA, 21 bp, synthetic construct
  source 1..21: mol_type = other DNA
  modified_base 1: mod_base = OTHER; note = adenosine-3'-phosphate
  modified_base 2: mod_base = OTHER; note = adenosine-3'-phosphate
  modified_base 3: mod_base = OTHER; note = adenosine-3'-phosphate
  modified_base 4: mod_base = OTHER; note = adenosine-3'-phosphate
  modified_base 5: mod_base = OTHER; note = uridine-3'-phosphate
  modified_base 6: mod_base = OTHER; note = uridine-3'-phosphate
  modified_base 7: mod_base = OTHER; note = adenosine-3'-phosphate
  modified_base 8: mod_base = OTHER; note = cytidine-3'-phosphate
  modified_base 9: mod_base = OTHER; note = adenosine-3'-phosphate
  modified_base 10: mod_base = OTHER; note = guanosine-3'-phosphate
  modified_base 11: mod_base = OTHER; note = guanosine-3'-phosphate
  modified_base 12: mod_base = OTHER; note = guanosine-3'-phosphate
  modified_base 13: mod_base = OTHER; note = uridine-3'-phosphate
  modified_base 14: mod_base = OTHER; note = adenosine-3'-phosphate
  modified_base 15: mod_base = OTHER; note = cytidine-3'-phosphate
  modified_base 16: mod_base = OTHER; note = cytidine-3'-phosphate
  modified_base 17: mod_base = OTHER; note = uridine-3'-phosphate
  modified_base 18: mod_base = OTHER; note = uridine-3'-phosphate
  modified_base 19: mod_base = OTHER; note = guanosine-3'-phosphate
  misc_feature 1..19: note = RNA
  misc_feature 20..21: note = DNA
aaaattacagggtaccttgtt

SEQ ID NO: 2106 - DNA, 21 bp, synthetic construct
  source 1..21: mol_type = other DNA
  modified_base 1: mod_base = OTHER; note = adenosine-3'-phosphate
  modified_base 2: mod_base = OTHER; note = guanosine-3'-phosphate
  modified_base 3: mod_base = OTHER; note = guanosine-3'-phosphate
  modified_base 4: mod_base = OTHER; note = guanosine-3'-phosphate
  modified_base 5: mod_base = OTHER; note = uridine-3'-phosphate
  modified_base 6: mod_base = OTHER; note = adenosine-3'-phosphate
  modified_base 7: mod_base = OTHER; note = cytidine-3'-phosphate
  modified_base 8: mod_base = OTHER; note = cytidine-3'-phosphate
  modified_base 9: mod_base = OTHER; note = uridine-3'-phosphate
  modified_base 10: mod_base = OTHER; note = uridine-3'-phosphate
  modified_base 11: mod_base = OTHER; note = guanosine-3'-phosphate
  modified_base 12: mod_base = OTHER; note = cytidine-3'-phosphate
  modified_base 13: mod_base = OTHER; note = cytidine-3'-phosphate
  modified_base 14: mod_base = OTHER; note = uridine-3'-phosphate
  modified_base 15: mod_base = OTHER; note = guanosine-3'-phosphate
  modified_base 16: mod_base = OTHER; note = uridine-3'-phosphate
  modified_base 17: mod_base = OTHER; note = uridine-3'-phosphate
  modified_base 18: mod_base = OTHER; note = guanosine-3'-phosphate
  modified_base 19: mod_base = OTHER; note = adenosine-3'-phosphate
  misc_feature 1..19: note = RNA
  misc_feature 20..21: note = DNA
agggtaccttgcctgttgatt

SEQ ID NO: 2107 - DNA, 21 bp, synthetic construct
  source 1..21: mol_type = other DNA
  modified_base 1: mod_base = OTHER; note = guanosine-3'-phosphate
  modified_base 2: mod_base = OTHER; note = uridine-3'-phosphate
  modified_base 3: mod_base = OTHER; note = uridine-3'-phosphate
  modified_base 4: mod_base = OTHER; note = guanosine-3'-phosphate
  modified_base 5: mod_base = OTHER; note = adenosine-3'-phosphate
  modified_base 6: mod_base = OTHER; note = adenosine-3'-phosphate
  modified_base 7: mod_base = OTHER; note = guanosine-3'-phosphate
  modified_base 8: mod_base = OTHER; note = cytidine-3'-phosphate
  modified_base 9: mod_base = OTHER; note = cytidine-3'-phosphate
  modified_base 10: mod_base = OTHER; note = cytidine-3'-phosphate
  modified_base 11: mod_base = OTHER; note = guanosine-3'-phosphate
  modified_base 12: mod_base = OTHER; note = adenosine-3'-phosphate
  modified_base 13: mod_base = OTHER; note = guanosine-3'-phosphate
  modified_base 14: mod_base = OTHER; note = adenosine-3'-phosphate
  modified_base 15: mod_base = OTHER; note = guanosine-3'-phosphate
  modified_base 16: mod_base = OTHER; note = adenosine-3'-phosphate
  modified_base 17: mod_base = OTHER; note = adenosine-3'-phosphate
  modified_base 18: mod_base = OTHER; note = cytidine-3'-phosphate
  modified_base 19: mod_base = OTHER; note = adenosine-3'-phosphate
  misc_feature 1..19: note = RNA
  misc_feature 20..21: note = DNA
gttgaagcccgagagaacatt

SEQ ID NO: 2108 - DNA, 21 bp, synthetic construct
  source 1..21: mol_type = other DNA
  modified_base 1: mod_base = OTHER; note = cytidine-3'-phosphate
  modified_base 2: mod_base = OTHER; note = cytidine-3'-phosphate
  modified_base 3: mod_base = OTHER; note = guanosine-3'-phosphate
  modified_base 4: mod_base = OTHER; note = adenosine-3'-phosphate
  modified_base 5: mod_base = OTHER; note = guanosine-3'-phosphate
  modified_base 6: mod_base = OTHER; note = adenosine-3'-phosphate
  modified_base 7: mod_base = OTHER; note = guanosine-3'-phosphate
  modified_base 8: mod_base = OTHER; note = adenosine-3'-phosphate
  modified_base 9: mod_base = OTHER; note = adenosine-3'-phosphate
  modified_base 10: mod_base = OTHER; note = cytidine-3'-phosphate
  modified_base 11: mod_base = OTHER; note = adenosine-3'-phosphate
  modified_base 12: mod_base = OTHER; note = guanosine-3'-phosphate
  modified_base 13: mod_base = OTHER; note = cytidine-3'-phosphate
  modified_base 14: mod_base = OTHER; note = uridine-3'-phosphate
  modified_base 15: mod_base = OTHER; note = uridine-3'-phosphate
  modified_base 16: mod_base = OTHER; note = adenosine-3'-phosphate
  modified_base 17: mod_base = OTHER; note = uridine-3'-phosphate
  modified_base 18: mod_base = OTHER; note = adenosine-3'-phosphate
  modified_base 19: mod_base = OTHER; note = uridine-3'-phosphate
  misc_feature 1..19: note = RNA
  misc_feature 20..21: note = DNA
ccgagagaacagcttatattt

SEQ ID NO: 2109 - DNA, 21 bp, synthetic construct
  source 1..21: mol_type = other DNA
  modified_base 1: mod_base = OTHER; note = guanosine-3'-phosphate
  modified_base 2: mod_base = OTHER; note = cytidine-3'-phosphate
  modified_base 3: mod_base = OTHER; note = uridine-3'-phosphate
  modified_base 4: mod_base = OTHER; note = uridine-3'-phosphate
  modified_base 5: mod_base = OTHER; note = adenosine-3'-phosphate
  modified_base 6: mod_base = OTHER; note = uridine-3'-phosphate
  modified_base 7: mod_base = OTHER; note = adenosine-3'-phosphate
  modified_base 8: mod_base = OTHER; note = uridine-3'-phosphate
  modified_base 9: mod_base = OTHER; note = cytidine-3'-phosphate
  modified_base 10: mod_base = OTHER; note = uridine-3'-phosphate
  modified_base 11: mod_base = OTHER; note = uridine-3'-phosphate
  modified_base 12: mod_base = OTHER; note = adenosine-3'-phosphate
  modified_base 13: mod_base = OTHER; note = cytidine-3'-phosphate
  modified_base 14: mod_base = OTHER; note = adenosine-3'-phosphate
  modified_base 15: mod_base = OTHER; note = guanosine-3'-phosphate
  modified_base 16: mod_base = OTHER; note = cytidine-3'-phosphate
  modified_base 17: mod_base = OTHER; note = cytidine-3'-phosphate
  modified_base 18: mod_base = OTHER; note = uridine-3'-phosphate
  modified_base 19: mod_base = OTHER; note = uridine-3'-phosphate
  misc_feature 1..19: note = RNA
  misc_feature 20..21: note = DNA
gcttatatcttacagcctttt

SEQ ID NO: 2110 - DNA, 21 bp, synthetic construct
  source 1..21: mol_type = other DNA
  modified_base 1: mod_base = OTHER; note = cytidine-3'-phosphate
  modified_base 2: mod_base = OTHER; note = uridine-3'-phosphate
  modified_base 3: mod_base = OTHER; note = uridine-3'-phosphate
  modified_base 4: mod_base = OTHER; note = adenosine-3'-phosphate
  modified_base 5: mod_base = OTHER; note = cytidine-3'-phosphate
  modified_base 6: mod_base = OTHER; note = adenosine-3'-phosphate
  modified_base 7: mod_base = OTHER; note = guanosine-3'-phosphate
  modified_base 8: mod_base = OTHER; note = cytidine-3'-phosphate
  modified_base 9: mod_base = OTHER; note = cytidine-3'-phosphate
  modified_base 10: mod_base = OTHER; note = uridine-3'-phosphate
  modified_base 11: mod_base = OTHER; note = uridine-3'-phosphate
  modified_base 12: mod_base = OTHER; note = uridine-3'-phosphate
  modified_base 13: mod_base = OTHER; note = adenosine-3'-phosphate
  modified_base 14: mod_base = OTHER; note = cytidine-3'-phosphate
  modified_base 15: mod_base = OTHER; note = uridine-3'-phosphate
  modified_base 16: mod_base = OTHER; note = guanosine-3'-phosphate
  modified_base 17: mod_base = OTHER; note = uridine-3'-phosphate
  modified_base 18: mod_base = OTHER; note = guanosine-3'-phosphate
  modified_base 19: mod_base = OTHER; note = adenosine-3'-phosphate
  misc_feature 1..19: note = RNA
  misc_feature 20..21: note = DNA
cttacagcctttactgtgatt

SEQ ID NO: 2111 - DNA, 21 bp, synthetic construct
  source 1..21: mol_type = other DNA
  modified_base 1: mod_base = OTHER; note = guanosine-3'-phosphate
  modified_base 2: mod_base = OTHER; note = adenosine-3'-phosphate
  modified_base 3: mod_base = OTHER; note = adenosine-3'-phosphate
  modified_base 4: mod_base = OTHER; note = uridine-3'-phosphate
  modified_base 5: mod_base = OTHER; note = uridine-3'-phosphate
  modified_base 6: mod_base = OTHER; note = adenosine-3'-phosphate
  modified_base 7: mod_base = OTHER; note = guanosine-3'-phosphate
  modified_base 8: mod_base = OTHER; note = adenosine-3'-phosphate
  modified_base 9: mod_base = OTHER; note = adenosine-3'-phosphate
  modified_base 10: mod_base = OTHER; note = adenosine-3'-phosphate
  modified_base 11: mod_base = OTHER; note = guanosine-3'-phosphate
  modified_base 12: mod_base = OTHER; note = guanosine-3'-phosphate
  modified_base 13: mod_base = OTHER; note = cytidine-3'-phosphate
  modified_base 14: mod_base = OTHER; note = uridine-3'-phosphate
  modified_base 15: mod_base = OTHER; note = uridine-3'-phosphate
  modified_base 16: mod_base = OTHER; note = uridine-3'-phosphate
  modified_base 17: mod_base = OTHER; note = cytidine-3'-phosphate
  modified_base 18: mod_base = OTHER; note = guanosine-3'-phosphate
  modified_base 19: mod_base = OTHER; note = adenosine-3'-phosphate
  misc_feature 1..19: note = RNA
  misc_feature 20..21: note = DNA
gaattagaaaggctttcgatt

SEQ ID NO: 2112 - DNA, 21 bp, synthetic construct
  source 1..21: mol_type = other DNA
  modified_base 1: mod_base = OTHER; note = guanosine-3'-phosphate
  modified_base 2: mod_base = OTHER; note = guanosine-3'-phosphate
  modified_base 3: mod_base = OTHER; note = cytidine-3'-phosphate
  modified_base 4: mod_base = OTHER; note = uridine-3'-phosphate
  modified_base 5: mod_base = OTHER; note = uridine-3'-phosphate
  modified_base 6: mod_base = OTHER; note = uridine-3'-phosphate
  modified_base 7: mod_base = OTHER; note = cytidine-3'-phosphate
  modified_base 8: mod_base = OTHER; note = guanosine-3'-phosphate
  modified_base 9: mod_base = OTHER; note = adenosine-3'-phosphate
  modified_base 10: mod_base = OTHER; note = uridine-3'-phosphate
  modified_base 11: mod_base = OTHER; note = adenosine-3'-phosphate
  modified_base 12: mod_base = OTHER; note = uridine-3'-phosphate
  modified_base 13: mod_base = OTHER; note = adenosine-3'-phosphate
  modified_base 14: mod_base = OTHER; note = uridine-3'-phosphate
  modified_base 15: mod_base = OTHER; note = guanosine-3'-phosphate
  modified_base 16: mod_base = OTHER; note = cytidine-3'-phosphate
  modified_base 17: mod_base = OTHER; note = cytidine-3'-phosphate
  modified_base 18: mod_base = OTHER; note = cytidine-3'-phosphate
  modified_base 19: mod_base = OTHER; note = cytidine-3'-phosphate
  misc_feature 1..19: note = RNA
  misc_feature 20..21: note = DNA
ggctttcgatatatgcccctt

SEQ ID NO: 2113 - DNA, 21 bp, synthetic construct
  source 1..21: mol_type = other DNA
  modified_base 1: mod_base = OTHER; note = guanosine-3'-phosphate
  modified_base 2: mod_base = OTHER; note = adenosine-3'-phosphate
  modified_base 3: mod_base = OTHER; note = uridine-3'-phosphate
  modified_base 4: mod_base = OTHER; note = adenosine-3'-phosphate
  modified_base 5: mod_base = OTHER; note = uridine-3'-phosphate
  modified_base 6: mod_base = OTHER; note = adenosine-3'-phosphate
  modified_base 7: mod_base = OTHER; note = uridine-3'-phosphate
  modified_base 8: mod_base = OTHER; note = guanosine-3'-phosphate
  modified_base 9: mod_base = OTHER; note = cytidine-3'-phosphate
  modified_base 10: mod_base = OTHER; note = cytidine-3'-phosphate
  modified_base 11: mod_base = OTHER; note = cytidine-3'-phosphate
  modified_base 12: mod_base = OTHER; note = cytidine-3'-phosphate
  modified_base 13: mod_base = OTHER; note = cytidine-3'-phosphate
  modified_base 14: mod_base = OTHER; note = uridine-3'-phosphate
  modified_base 15: mod_base = OTHER; note = guanosine-3'-phosphate
  modified_base 16: mod_base = OTHER; note = guanosine-3'-phosphate
  modified_base 17: mod_base = OTHER; note = uridine-3'-phosphate
  modified_base 18: mod_base = OTHER; note = guanosine-3'-phosphate
  modified_base 19: mod_base = OTHER; note = adenosine-3'-phosphate
  misc_feature 1..19: note = RNA
  misc_feature 20..21: note = DNA
gatatatgccccctggtgatt

SEQ ID NO: 2114 - DNA, 21 bp, synthetic construct
  source 1..21: mol_type = other DNA
  modified_base 1: mod_base = OTHER; note = guanosine-3'-phosphate
  modified_base 2: mod_base = OTHER; note = guanosine-3'-phosphate
  modified_base 3: mod_base = OTHER; note = uridine-3'-phosphate
  modified_base 4: mod_base = OTHER; note = guanosine-3'-phosphate
  modified_base 5: mod_base = OTHER; note = adenosine-3'-phosphate
  modified_base 6: mod_base = OTHER; note = adenosine-3'-phosphate
  modified_base 7: mod_base = OTHER; note = adenosine-3'-phosphate
  modified_base 8: mod_base = OTHER; note = adenosine-3'-phosphate
  modified_base 9: mod_base = OTHER; note = uridine-3'-phosphate
  modified_base 10: mod_base = OTHER; note = cytidine-3'-phosphate
  modified_base 11: mod_base = OTHER; note = guanosine-3'-phosphate
  modified_base 12: mod_base = OTHER; note = adenosine-3'-phosphate
  modified_base 13: mod_base = OTHER; note = cytidine-3'-phosphate
  modified_base 14: mod_base = OTHER; note = adenosine-3'-phosphate
  modified_base 15: mod_base = OTHER; note = cytidine-3'-phosphate
  modified_base 16: mod_base = OTHER; note = adenosine-3'-phosphate
  modified_base 17: mod_base = OTHER; note = guanosine-3'-phosphate
  modified_base 18: mod_base = OTHER; note = cytidine-3'-phosphate
  modified_base 19: mod_base = OTHER; note = uridine-3'-phosphate
  misc_feature 1..19: note = RNA
  misc_feature 20..21: note = DNA
ggtgaaaatcgacacagcttt

SEQ ID NO: 2115 - DNA, 21 bp, synthetic construct
  source 1..21: mol_type = other DNA
  modified_base 1: mod_base = OTHER; note = cytidine-3'-phosphate
  modified_base 2: mod_base = OTHER; note = guanosine-3'-phosphate
  modified_base 3: mod_base = OTHER; note = adenosine-3'-phosphate
  modified_base 4: mod_base = OTHER; note = cytidine-3'-phosphate
  modified_base 5: mod_base = OTHER; note = adenosine-3'-phosphate
  modified_base 6: mod_base = OTHER; note = cytidine-3'-phosphate
  modified_base 7: mod_base = OTHER; note = adenosine-3'-phosphate
  modified_base 8: mod_base = OTHER; note = guanosine-3'-phosphate
  modified_base 9: mod_base = OTHER; note = cytidine-3'-phosphate
  modified_base 10: mod_base = OTHER; note = uridine-3'-phosphate
  modified_base 11: mod_base = OTHER; note = cytidine-3'-phosphate
  modified_base 12: mod_base = OTHER; note = uridine-3'-phosphate
  modified_base 13: mod_base = OTHER; note = adenosine-3'-phosphate
  modified_base 14: mod_base = OTHER; note = adenosine-3'-phosphate
  modified_base 15: mod_base = OTHER; note = uridine-3'-phosphate
  modified_base 16: mod_base = OTHER; note = uridine-3'-phosphate
  modified_base 17: mod_base = OTHER; note = adenosine-3'-phosphate
  modified_base 18: mod_base = OTHER; note = adenosine-3'-phosphate
  modified_base 19: mod_base = OTHER; note = adenosine-3'-phosphate
  misc_feature 1..19: note = RNA
  misc_feature 20..21: note = DNA
cgacacagctctaattaaatt

SEQ ID NO: 2116 - DNA, 21 bp, synthetic construct
  source 1..21: mol_type = other DNA
  modified_base 1: mod_base = OTHER; note = guanosine-3'-phosphate
  modified_base 2: mod_base = OTHER; note = cytidine-3'-phosphate
  modified_base 3: mod_base = OTHER; note = uridine-3'-phosphate
  modified_base 4: mod_base = OTHER; note = cytidine-3'-phosphate
  modified_base 5: mod_base = OTHER; note = uridine-3'-phosphate
  modified_base 6: mod_base = OTHER; note = adenosine-3'-phosphate
  modified_base 7: mod_base = OTHER; note = adenosine-3'-phosphate
  modified_base 8: mod_base = OTHER; note = uridine-3'-phosphate
  modified_base 9: mod_base = OTHER; note = uridine-3'-phosphate
  modified_base 10: mod_base = OTHER; note = adenosine-3'-phosphate
  modified_base 11: mod_base = OTHER; note = adenosine-3'-phosphate
  modified_base 12: mod_base = OTHER; note = adenosine-3'-phosphate
  modified_base 13: mod_base = OTHER; note = guanosine-3'-phosphate
  modified_base 14: mod_base = OTHER; note = cytidine-3'-phosphate
  modified_base 15: mod_base = OTHER; note = uridine-3'-phosphate
  modified_base 16: mod_base = OTHER; note = guanosine-3'-phosphate
  modified_base 17: mod_base = OTHER; note = adenosine-3'-phosphate
  modified_base 18: mod_base = OTHER; note = cytidine-3'-phosphate
  modified_base 19: mod_base = OTHER; note = adenosine-3'-phosphate
  misc_feature 1..19: note = RNA
  misc_feature 20..21: note = DNA
gctctaattaaagctgacatt

SEQ ID NO: 2117 - DNA, 21 bp, synthetic construct
  source 1..21: mol_type = other DNA
  modified_base 1: mod_base = OTHER; note = cytidine-3'-phosphate
  modified_base 2: mod_base = OTHER; note = uridine-3'-phosphate
  modified_base 3: mod_base = OTHER; note = guanosine-3'-phosphate
  modified_base 4: mod_base = OTHER; note = adenosine-3'-phosphate
  modified_base 5: mod_base = OTHER; note = cytidine-3'-phosphate
  modified_base 6: mod_base = OTHER; note = adenosine-3'-phosphate
  modified_base 7: mod_base = OTHER; note = adenosine-3'-phosphate
  modified_base 8: mod_base = OTHER; note = cytidine-3'-phosphate
  modified_base 9: mod_base = OTHER; note = uridine-3'-phosphate
  modified_base 10: mod_base = OTHER; note = uridine-3'-phosphate
  modified_base 11: mod_base = OTHER; note = uridine-3'-phosphate
  modified_base 12: mod_base = OTHER; note = cytidine-3'-phosphate
  modified_base 13: mod_base = OTHER; note = uridine-3'-phosphate
  modified_base 14: mod_base = OTHER; note = guanosine-3'-phosphate
  modified_base 15: mod_base = OTHER; note = cytidine-3'-phosphate
  modified_base 16: mod_base = OTHER; note = uridine-3'-phosphate
  modified_base 17: mod_base = OTHER; note = uridine-3'-phosphate
  modified_base 18: mod_base = OTHER; note = guanosine-3'-phosphate
  modified_base 19: mod_base = OTHER; note = adenosine-3'-phosphate
  misc_feature 1..19: note = RNA
  misc_feature 20..21: note = DNA
ctgacaactttctgcttgatt

SEQ ID NO: 2118 - DNA, 21 bp, synthetic construct
  source 1..21: mol_type = other DNA
  modified_base 1: mod_base = OTHER; note = cytidine-3'-phosphate
  modified_base 2: mod_base = OTHER; note = uridine-3'-phosphate
  modified_base 3: mod_base = OTHER; note = uridine-3'-phosphate
  modified_base 4: mod_base = OTHER; note = uridine-3'-phosphate
  modified_base 5: mod_base = OTHER; note = cytidine-3'-phosphate
  modified_base 6: mod_base = OTHER; note = uridine-3'-phosphate
  modified_base 7: mod_base = OTHER; note = guanosine-3'-phosphate
  modified_base 8: mod_base = OTHER; note = cytidine-3'-phosphate
  modified_base 9: mod_base = OTHER; note = uridine-3'-phosphate
  modified_base 10: mod_base = OTHER; note = uridine-3'-phosphate
  modified_base 11: mod_base = OTHER; note = guanosine-3'-phosphate
  modified_base 12: mod_base = OTHER; note = adenosine-3'-phosphate
  modified_base 13: mod_base = OTHER; note = adenosine-3'-phosphate
  modified_base 14: mod_base = OTHER; note = adenosine-3'-phosphate
  modified_base 15: mod_base = OTHER; note = adenosine-3'-phosphate
  modified_base 16: mod_base = OTHER; note = uridine-3'-phosphate
  modified_base 17: mod_base = OTHER; note = adenosine-3'-phosphate
  modified_base 18: mod_base = OTHER; note = cytidine-3'-phosphate
  modified_base 19: mod_base = OTHER; note = adenosine-3'-phosphate
  misc_feature 1..19: note = RNA
  misc_feature 20..21: note = DNA
ctttctgcttgaaaatacatt

SEQ ID NO: 2119 - DNA, 21 bp, synthetic construct
  source 1..21: mol_type = other DNA
  modified_base 1: mod_base = OTHER; note = adenosine-3'-phosphate
  modified_base 2: mod_base = OTHER; note = adenosine-3'-phosphate
  modified_base 3: mod_base = OTHER; note = adenosine-3'-phosphate
  modified_base 4: mod_base = OTHER; note = adenosine-3'-phosphate
  modified_base 5: mod_base = OTHER; note = uridine-3'-phosphate
  modified_base 6: mod_base = OTHER; note = adenosine-3'-phosphate
  modified_base 7: mod_base = OTHER; note = cytidine-3'-phosphate
  modified_base 8: mod_base = OTHER; note = adenosine-3'-phosphate
  modified_base 9: mod_base = OTHER; note = cytidine-3'-phosphate
  modified_base 10: mod_base = OTHER; note = uridine-3'-phosphate
  modified_base 11: mod_base = OTHER; note = guanosine-3'-phosphate
  modified_base 12: mod_base = OTHER; note = cytidine-3'-phosphate
  modified_base 13: mod_base = OTHER; note = cytidine-3'-phosphate
  modified_base 14: mod_base = OTHER; note = adenosine-3'-phosphate
  modified_base 15: mod_base = OTHER; note = guanosine-3'-phosphate
  modified_base 16: mod_base = OTHER; note = cytidine-3'-phosphate
  modified_base 17: mod_base = OTHER; note = cytidine-3'-phosphate
  modified_base 18: mod_base = OTHER; note = cytidine-3'-phosphate
  modified_base 19: mod_base = OTHER; note = adenosine-3'-phosphate
  misc_feature 1..19: note = RNA
  misc_feature 20..21: note = DNA
aaaatacactgccagcccatt

SEQ ID NO: 2120 - DNA, 21 bp, synthetic construct
  source 1..21: mol_type = other DNA
  modified_base 1: mod_base = OTHER; note = adenosine-3'-phosphate
  modified_base 2: mod_base = OTHER; note = guanosine-3'-phosphate
  modified_base 3: mod_base = OTHER; note = cytidine-3'-phosphate
  modified_base 4: mod_base = OTHER; note = cytidine-3'-phosphate
  modified_base 5: mod_base = OTHER; note = cytidine-3'-phosphate
  modified_base 6: mod_base = OTHER; note = adenosine-3'-phosphate
  modified_base 7: mod_base = OTHER; note = guanosine-3'-phosphate
  modified_base 8: mod_base = OTHER; note = adenosine-3'-phosphate
  modified_base 9: mod_base = OTHER; note = guanosine-3'-phosphate
  modified_base 10: mod_base = OTHER; note = cytidine-3'-phosphate
  modified_base 11: mod_base = OTHER; note = adenosine-3'-phosphate
  modified_base 12: mod_base = OTHER; note = cytidine-3'-phosphate
  modified_base 13: mod_base = OTHER; note = cytidine-3'-phosphate
  modified_base 14: mod_base = OTHER; note = uridine-3'-phosphate
  modified_base 15: mod_base = OTHER; note = uridine-3'-phosphate
  modified_base 16: mod_base = OTHER; note = uridine-3'-phosphate
  modified_base 17: mod_base = OTHER; note = adenosine-3'-phosphate
  modified_base 18: mod_base = OTHER; note = cytidine-3'-phosphate
  modified_base 19: mod_base = OTHER; note = adenosine-3'-phosphate
  misc_feature 1..19: note = RNA
  misc_feature 20..21: note = DNA
agcccagagcacctttacatt

SEQ ID NO: 2121 - DNA, 21 bp, synthetic construct
  source 1..21: mol_type = other DNA
  modified_base 1: mod_base = OTHER; note = guanosine-3'-phosphate
  modified_base 2: mod_base = OTHER; note = cytidine-3'-phosphate
  modified_base 3: mod_base = OTHER; note = adenosine-3'-phosphate
  modified_base 4: mod_base = OTHER; note = cytidine-3'-phosphate
  modified_base 5: mod_base = OTHER; note = cytidine-3'-phosphate
  modified_base 6: mod_base = OTHER; note = uridine-3'-phosphate
  modified_base 7: mod_base = OTHER; note = uridine-3'-phosphate
  modified_base 8: mod_base = OTHER; note = uridine-3'-phosphate
  modified_base 9: mod_base = OTHER; note = adenosine-3'-phosphate
  modified_base 10: mod_base = OTHER; note = cytidine-3'-phosphate
  modified_base 11: mod_base = OTHER; note = adenosine-3'-phosphate
  modified_base 12: mod_base = OTHER; note = uridine-3'-phosphate
  modified_base 13: mod_base = OTHER; note = uridine-3'-phosphate
  modified_base 14: mod_base = OTHER; note = guanosine-3'-phosphate
  modified_base 15: mod_base = OTHER; note = guanosine-3'-phosphate
  modified_base 16: mod_base = OTHER; note = cytidine-3'-phosphate
  modified_base 17: mod_base = OTHER; note = cytidine-3'-phosphate
  modified_base 18: mod_base = OTHER; note = adenosine-3'-phosphate
  modified_base 19: mod_base = OTHER; note = uridine-3'-phosphate
  misc_feature 1..19: note = RNA
  misc_feature 20..21: note = DNA
gcacctttacattggccattt

SEQ ID NO: 2122 - DNA, 21 bp, synthetic construct
  source 1..21: mol_type = other DNA
  modified_base 1: mod_base = OTHER; note = adenosine-3'-phosphate
  modified_base 2: mod_base = OTHER; note = cytidine-3'-phosphate
  modified_base 3: mod_base = OTHER; note = adenosine-3'-phosphate
  modified_base 4: mod_base = OTHER; note = uridine-3'-phosphate
  modified_base 5: mod_base = OTHER; note = uridine-3'-phosphate
  modified_base 6: mod_base = OTHER; note = guanosine-3'-phosphate
  modified_base 7: mod_base = OTHER; note = guanosine-3'-phosphate
  modified_base 8: mod_base = OTHER; note = cytidine-3'-phosphate
  modified_base 9: mod_base = OTHER; note = cytidine-3'-phosphate
  modified_base 10: mod_base = OTHER; note = adenosine-3'-phosphate
  modified_base 11: mod_base = OTHER; note = uridine-3'-phosphate
  modified_base 12: mod_base = OTHER; note = uridine-3'-phosphate
  modified_base 13: mod_base = OTHER; note = uridine-3'-phosphate
  modified_base 14: mod_base = OTHER; note = cytidine-3'-phosphate
  modified_base 15: mod_base = OTHER; note = uridine-3'-phosphate
  modified_base 16: mod_base = OTHER; note = guanosine-3'-phosphate
  modified_base 17: mod_base = OTHER; note = cytidine-3'-phosphate
  modified_base 18: mod_base = OTHER; note = guanosine-3'-phosphate
  modified_base 19: mod_base = OTHER; note = uridine-3'-phosphate
  misc_feature 1..19: note = RNA
  misc_feature 20..21: note = DNA
acattggccatttctgcgttt

SEQ ID NO: 2123 - DNA, 21 bp, synthetic construct
  source 1..21: mol_type = other DNA
  modified_base 1: mod_base = OTHER; note = cytidine-3'-phosphate
  modified_base 2: mod_base = OTHER; note = uridine-3'-phosphate
  modified_base 3: mod_base = OTHER; note = guanosine-3'-phosphate
  modified_base 4: mod_base = OTHER; note = cytidine-3'-phosphate
  modified_base 5: mod_base = OTHER; note = guanosine-3'-phosphate
  modified_base 6: mod_base = OTHER; note = uridine-3'-phosphate
  modified_base 7: mod_base = OTHER; note = adenosine-3'-phosphate
  modified_base 8: mod_base = OTHER; note = uridine-3'-phosphate
  modified_base 9: mod_base = OTHER; note = guanosine-3'-phosphate
  modified_base 10: mod_base = OTHER; note = cytidine-3'-phosphate
  modified_base 11: mod_base = OTHER; note = uridine-3'-phosphate
  modified_base 12: mod_base = OTHER; note = cytidine-3'-phosphate
  modified_base 13: mod_base = OTHER; note = uridine-3'-phosphate
  modified_base 14: mod_base = OTHER; note = uridine-3'-phosphate
  modified_base 15: mod_base = OTHER; note = uridine-3'-phosphate
  modified_base 16: mod_base = OTHER; note = cytidine-3'-phosphate
  modified_base 17: mod_base = OTHER; note = cytidine-3'-phosphate
  modified_base 18: mod_base = OTHER; note = cytidine-3'-phosphate
  modified_base 19: mod_base = OTHER; note = uridine-3'-phosphate
  misc_feature 1..19: note = RNA
  misc_feature 20..21: note = DNA
ctgcgtatgctctttcccttt

SEQ ID NO: 2124 - DNA, 21 bp, synthetic construct
  source 1..21: mol_type = other DNA
  modified_base 1: mod_base = OTHER; note = cytidine-3'-phosphate
  modified_base 2: mod_base = OTHER; note = uridine-3'-phosphate
  modified_base 3: mod_base = OTHER; note = uridine-3'-phosphate
  modified_base 4: mod_base = OTHER; note = uridine-3'-phosphate
  modified_base 5: mod_base = OTHER; note = cytidine-3'-phosphate
  modified_base 6: mod_base = OTHER; note = cytidine-3'-phosphate
  modified_base 7: mod_base = OTHER; note = cytidine-3'-phosphate
  modified_base 8: mod_base = OTHER; note = uridine-3'-phosphate
  modified_base 9: mod_base = OTHER; note = guanosine-3'-phosphate
  modified_base 10: mod_base = OTHER; note = guanosine-3'-phosphate
  modified_base 11: mod_base = OTHER; note = guanosine-3'-phosphate
  modified_base 12: mod_base = OTHER; note = adenosine-3'-phosphate
  modified_base 13: mod_base = OTHER; note = guanosine-3'-phosphate
  modified_base 14: mod_base = OTHER; note = adenosine-3'-phosphate
  modified_base 15: mod_base = OTHER; note = uridine-3'-phosphate
  modified_base 16: mod_base = OTHER; note = adenosine-3'-phosphate
  modified_base 17: mod_base = OTHER; note = adenosine-3'-phosphate
  modified_base 18: mod_base = OTHER; note = adenosine-3'-phosphate
  modified_base 19: mod_base = OTHER; note = adenosine-3'-phosphate
  misc_feature 1..19: note = RNA
  misc_feature 20..21: note = DNA
ctttccctgggagataaaatt

SEQ ID NO: 2125 - DNA, 21 bp, synthetic construct
  source 1..21: mol_type = other DNA
  modified_base 1: mod_base = OTHER; note = guanosine-3'-phosphate
  modified_base 2: mod_base = OTHER; note = adenosine-3'-phosphate
  modified_base 3: mod_base = OTHER; note = guanosine-3'-phosphate
  modified_base 4: mod_base = OTHER; note = adenosine-3'-phosphate
  modified_base 5: mod_base = OTHER; note = uridine-3'-phosphate
  modified_base 6: mod_base = OTHER; note = adenosine-3'-phosphate
  modified_base 7: mod_base = OTHER; note = adenosine-3'-phosphate
  modified_base 8: mod_base = OTHER; note = adenosine-3'-phosphate
  modified_base 9: mod_base = OTHER; note = adenosine-3'-phosphate
  modified_base 10: mod_base = OTHER; note = cytidine-3'-phosphate
  modified_base 11: mod_base = OTHER; note = uridine-3'-phosphate
  modified_base 12: mod_base = OTHER; note = cytidine-3'-phosphate
  modified_base 13: mod_base = OTHER; note = adenosine-3'-phosphate
  modified_base 14: mod_base = OTHER; note = cytidine-3'-phosphate
  modified_base 15: mod_base = OTHER; note = cytidine-3'-phosphate
  modified_base 16: mod_base = OTHER; note = cytidine-3'-phosphate
  modified_base 17: mod_base = OTHER; note = adenosine-3'-phosphate
  modified_base 18: mod_base = OTHER; note = cytidine-3'-phosphate
  modified_base 19: mod_base = OTHER; note = adenosine-3'-phosphate
  misc_feature 1..19: note = RNA
  misc_feature 20..21: note = DNA
gagataaaactcacccacatt

SEQ ID NO: 2126 - DNA, 21 bp, synthetic construct
  source 1..21: mol_type = other DNA
  modified_base 1: mod_base = OTHER; note = adenosine-3'-phosphate
  modified_base 2: mod_base = OTHER; note = cytidine-3'-phosphate
  modified_base 3: mod_base = OTHER; note = uridine-3'-phosphate
  modified_base 4: mod_base = OTHER; note = cytidine-3'-phosphate
  modified_base 5: mod_base = OTHER; note = adenosine-3'-phosphate
  modified_base 6: mod_base = OTHER; note = cytidine-3'-phosphate
  modified_base 7: mod_base = OTHER; note = cytidine-3'-phosphate
  modified_base 8: mod_base = OTHER; note = cytidine-3'-phosphate
  modified_base 9: mod_base = OTHER; note = adenosine-3'-phosphate
  modified_base 10: mod_base = OTHER; note = cytidine-3'-phosphate
  modified_base 11: mod_base = OTHER; note = adenosine-3'-phosphate
  modified_base 12: mod_base = OTHER; note = guanosine-3'-phosphate
  modified_base 13: mod_base = OTHER; note = uridine-3'-phosphate
  modified_base 14: mod_base = OTHER; note = uridine-3'-phosphate
  modified_base 15: mod_base = OTHER; note = uridine-3'-phosphate
  modified_base 16: mod_base = OTHER; note = cytidine-3'-phosphate
  modified_base 17: mod_base = OTHER; note = guanosine-3'-phosphate
  modified_base 18: mod_base = OTHER; note = uridine-3'-phosphate
  modified_base 19: mod_base = OTHER; note = uridine-3'-phosphate
  misc_feature 1..19: note = RNA
  misc_feature 20..21: note = DNA
actcacccacagtttcgtttt

SEQ ID NO: 2127 - DNA, 21 bp, synthetic construct
  source 1..21: mol_type = other DNA
  modified_base 1: mod_base = OTHER; note = cytidine-3'-phosphate
  modified_base 2: mod_base = OTHER; note = adenosine-3'-phosphate
  modified_base 3: mod_base = OTHER; note = guanosine-3'-phosphate
  modified_base 4: mod_base = OTHER; note = uridine-3'-phosphate
  modified_base 5: mod_base = OTHER; note = uridine-3'-phosphate
  modified_base 6: mod_base = OTHER; note = uridine-3'-phosphate
  modified_base 7: mod_base = OTHER; note = cytidine-3'-phosphate
  modified_base 8: mod_base = OTHER; note = guanosine-3'-phosphate
  modified_base 9: mod_base = OTHER; note = uridine-3'-phosphate
  modified_base 10: mod_base = OTHER; note = uridine-3'-phosphate
  modified_base 11: mod_base = OTHER; note = cytidine-3'-phosphate
  modified_base 12: mod_base = OTHER; note = adenosine-3'-phosphate
  modified_base 13: mod_base = OTHER; note = adenosine-3'-phosphate
  modified_base 14: mod_base = OTHER; note = uridine-3'-phosphate
  modified_base 15: mod_base = OTHER; note = uridine-3'-phosphate
  modified_base 16: mod_base = OTHER; note = guanosine-3'-phosphate
  modified_base 17: mod_base = OTHER; note = uridine-3'-phosphate
  modified_base 18: mod_base = OTHER; note = uridine-3'-phosphate
  modified_base 19: mod_base = OTHER; note = uridine-3'-phosphate
  misc_feature 1..19: note = RNA
  misc_feature 20..21: note = DNA
cagtttcgttcaattgttttt

SEQ ID NO: 2128 - DNA, 21 bp, synthetic construct
  source 1..21: mol_type = other DNA
  modified_base 1: mod_base = OTHER; note = cytidine-3'-phosphate
  modified_base 2: mod_base = OTHER; note = adenosine-3'-phosphate
  modified_base 3: mod_base = OTHER; note = adenosine-3'-phosphate
  modified_base 4: mod_base = OTHER; note = uridine-3'-phosphate
  modified_base 5: mod_base = OTHER; note = uridine-3'-phosphate
  modified_base 6: mod_base = OTHER; note = guanosine-3'-phosphate
  modified_base 7: mod_base = OTHER; note = uridine-3'-phosphate
  modified_base 8: mod_base = OTHER; note = uridine-3'-phosphate
  modified_base 9: mod_base = OTHER; note = uridine-3'-phosphate
  modified_base 10: mod_base = OTHER; note = cytidine-3'-phosphate
  modified_base 11: mod_base = OTHER; note = adenosine-3'-phosphate
  modified_base 12: mod_base = OTHER; note = guanosine-3'-phosphate
  modified_base 13: mod_base = OTHER; note = cytidine-3'-phosphate
  modified_base 14: mod_base = OTHER; note = uridine-3'-phosphate
  modified_base 15: mod_base = OTHER; note = uridine-3'-phosphate
  modified_base 16: mod_base = OTHER; note = uridine-3'-phosphate
  modified_base 17: mod_base = OTHER; note = guanosine-3'-phosphate
  modified_base 18: mod_base = OTHER; note = adenosine-3'-phosphate
  modified_base 19: mod_base = OTHER; note = adenosine-3'-phosphate
  misc_feature 1..19: note = RNA
  misc_feature 20..21: note = DNA
caattgtttcagctttgaatt

SEQ ID NO: 2129 - DNA, 21 bp, synthetic construct
  source 1..21: mol_type = other DNA
  modified_base 1: mod_base = OTHER; note = cytidine-3'-phosphate
  modified_base 2: mod_base = OTHER; note = uridine-3'-phosphate
  modified_base 3: mod_base = OTHER; note = uridine-3'-phosphate
  modified_base 4: mod_base = OTHER; note = uridine-3'-phosphate
  modified_base 5: mod_base = OTHER; note = guanosine-3'-phosphate
  modified_base 6: mod_base = OTHER; note = adenosine-3'-phosphate
  modified_base 7: mod_base = OTHER; note = adenosine-3'-phosphate
  modified_base 8: mod_base = OTHER; note = guanosine-3'-phosphate
  modified_base 9: mod_base = OTHER; note = adenosine-3'-phosphate
  modified_base 10: mod_base = OTHER; note = guanosine-3'-phosphate
  modified_base 11: mod_base = OTHER; note = adenosine-3'-phosphate
  modified_base 12: mod_base = OTHER; note = guanosine-3'-phosphate
  modified_base 13: mod_base = OTHER; note = adenosine-3'-phosphate
  modified_base 14: mod_base = OTHER; note = adenosine-3'-phosphate
  modified_base 15: mod_base = OTHER; note = guanosine-3'-phosphate
  modified_base 16: mod_base = OTHER; note = cytidine-3'-phosphate
  modified_base 17: mod_base = OTHER; note = uridine-3'-phosphate
  modified_base 18: mod_base = OTHER; note = uridine-3'-phosphate
  modified_base 19: mod_base = OTHER; note = uridine-3'-phosphate
  misc_feature 1..19: note = RNA
  misc_feature 20..21: note = DNA
ctttgaagagagaagcttttt

SEQ ID NO: 2130 - DNA, 21 bp, synthetic construct
  source 1..21: mol_type = other DNA
  modified_base 1: mod_base = OTHER; note = guanosine-3'-phosphate
  modified_base 2: mod_base = OTHER; note = adenosine-3'-phosphate
  modified_base 3: mod_base = OTHER; note = guanosine-3'-phosphate
  modified_base 4: mod_base = OTHER; note = adenosine-3'-phosphate
  modified_base 5: mod_base = OTHER; note = guanosine-3'-phosphate
  modified_base 6: mod_base = OTHER; note = adenosine-3'-phosphate
  modified_base 7: mod_base = OTHER; note = adenosine-3'-phosphate
  modified_base 8: mod_base = OTHER; note = guanosine-3'-phosphate
  modified_base 9: mod_base = OTHER; note = cytidine-3'-phosphate
  modified_base 10: mod_base = OTHER; note = uridine-3'-phosphate
  modified_base 11: mod_base = OTHER; note = uridine-3'-phosphate
  modified_base 12: mod_base = OTHER; note = uridine-3'-phosphate
  modified_base 13: mod_base = OTHER; note = guanosine-3'-phosphate
  modified_base 14: mod_base = OTHER; note = guanosine-3'-phosphate
  modified_base 15: mod_base = OTHER; note = uridine-3'-phosphate
  modified_base 16: mod_base = OTHER; note = uridine-3'-phosphate
  modified_base 17: mod_base = OTHER; note = adenosine-3'-phosphate
  modified_base 18: mod_base = OTHER; note = adenosine-3'-phosphate
  modified_base 19: mod_base = OTHER; note = adenosine-3'-phosphate
  misc_feature 1..19: note = RNA
  misc_feature 20..21: note = DNA
gagagaagctttggttaaatt

SEQ ID NO: 2131 - DNA, 21 bp, synthetic construct
  source 1..21: mol_type = other DNA
  modified_base 1: mod_base = OTHER; note = guanosine-3'-phosphate
  modified_base 2: mod_base = OTHER; note = uridine-3'-phosphate
  modified_base 3: mod_base = OTHER; note = uridine-3'-phosphate
  modified_base 4: mod_base = OTHER; note = adenosine-3'-phosphate
  modified_base 5: mod_base = OTHER; note = adenosine-3'-phosphate
  modified_base 6: mod_base = OTHER; note = adenosine-3'-phosphate
  modified_base 7: mod_base = OTHER; note = guanosine-3'-phosphate
  modified_base 8: mod_base = OTHER; note = guanosine-3'-phosphate
  modified_base 9: mod_base = OTHER; note = uridine-3'-phosphate
  modified_base 10: mod_base = OTHER; note = adenosine-3'-phosphate
  modified_base 11: mod_base = OTHER; note = adenosine-3'-phosphate
  modified_base 12: mod_base = OTHER; note = uridine-3'-phosphate
  modified_base 13: mod_base = OTHER; note = cytidine-3'-phosphate
  modified_base 14: mod_base = OTHER; note = cytidine-3'-phosphate
  modified_base 15: mod_base = OTHER; note = adenosine-3'-phosphate
  modified_base 16: mod_base = OTHER; note = cytidine-3'-phosphate
  modified_base 17: mod_base = OTHER; note = cytidine-3'-phosphate
  modified_base 18: mod_base = OTHER; note = cytidine-3'-phosphate
  modified_base 19: mod_base = OTHER; note = adenosine-3'-phosphate
  misc_feature 1..19: note = RNA
  misc_feature 20..21: note = DNA
gttaaaggtaatccacccatt

SEQ ID NO: 2132 - DNA, 21 bp, synthetic construct
  source 1..21: mol_type = other DNA
  modified_base 1: mod_base = OTHER; note = adenosine-3'-phosphate
  modified_base 2: mod_base = OTHER; note = adenosine-3'-phosphate
  modified_base 3: mod_base = OTHER; note = uridine-3'-phosphate
  modified_base 4: mod_base = OTHER; note = cytidine-3'-phosphate
  modified_base 5: mod_base = OTHER; note = cytidine-3'-phosphate
  modified_base 6: mod_base = OTHER; note = adenosine-3'-phosphate
  modified_base 7: mod_base = OTHER; note = cytidine-3'-phosphate
  modified_base 8: mod_base = OTHER; note = cytidine-3'-phosphate
  modified_base 9: mod_base = OTHER; note = cytidine-3'-phosphate
  modified_base 10: mod_base = OTHER; note = adenosine-3'-phosphate
  modified_base 11: mod_base = OTHER; note = uridine-3'-phosphate
  modified_base 12: mod_base = OTHER; note = uridine-3'-phosphate
  modified_base 13: mod_base = OTHER; note = uridine-3'-phosphate
  modified_base 14: mod_base = OTHER; note = adenosine-3'-phosphate
  modified_base 15: mod_base = OTHER; note = uridine-3'-phosphate
  modified_base 16: mod_base = OTHER; note = cytidine-3'-phosphate
  modified_base 17: mod_base = OTHER; note = guanosine-3'-phosphate
  modified_base 18: mod_base = OTHER; note = uridine-3'-phosphate
  modified_base 19: mod_base = OTHER; note = uridine-3'-phosphate
  misc_feature 1..19: note = RNA
  misc_feature 20..21: note = DNA
aatccacccatttatcgtttt

SEQ ID NO: 2133 - DNA, 21 bp, synthetic construct
  source 1..21: mol_type = other DNA
  modified_base 1: mod_base = OTHER; note = cytidine-3'-phosphate
  modified_base 2: mod_base = OTHER; note = adenosine-3'-phosphate
  modified_base 3: mod_base = OTHER; note = uridine-3'-phosphate
  modified_base 4: mod_base = OTHER; note = uridine-3'-phosphate
  modified_base 5: mod_base = OTHER; note = uridine-3'-phosphate
  modified_base 6: mod_base = OTHER; note = adenosine-3'-phosphate
  modified_base 7: mod_base = OTHER; note = uridine-3'-phosphate
  modified_base 8: mod_base = OTHER; note = cytidine-3'-phosphate
  modified_base 9: mod_base = OTHER; note = guanosine-3'-phosphate
  modified_base 10: mod_base = OTHER; note = uridine-3'-phosphate
  modified_base 11: mod_base = OTHER; note = uridine-3'-phosphate
  modified_base 12: mod_base = OTHER; note = uridine-3'-phosphate
  modified_base 13: mod_base = OTHER; note = uridine-3'-phosphate
  modified_base 14: mod_base = OTHER; note = uridine-3'-phosphate
  modified_base 15: mod_base = OTHER; note = guanosine-3'-phosphate
  modified_base 16: mod_base = OTHER; note = guanosine-3'-phosphate
  modified_base 17: mod_base = OTHER; note = adenosine-3'-phosphate
  modified_base 18: mod_base = OTHER; note = adenosine-3'-phosphate
  modified_base 19: mod_base = OTHER; note = adenosine-3'-phosphate
  misc_feature 1..19: note = RNA
  misc_feature 20..21: note = DNA
catttatcgtttttggaaatt

SEQ ID NO: 2134 - DNA, 21 bp, synthetic construct
  source 1..21: mol_type = other DNA
  modified_base 1: mod_base = OTHER; note = uridine-3'-phosphate
  modified_base 2: mod_base = OTHER; note = uridine-3'-phosphate
  modified_base 3: mod_base = OTHER; note = uridine-3'-phosphate
  modified_base 4: mod_base = OTHER; note = guanosine-3'-phosphate
  modified_base 5: mod_base = OTHER; note = guanosine-3'-phosphate
  modified_base 6: mod_base = OTHER; note = adenosine-3'-phosphate
  modified_base 7: mod_base = OTHER; note = adenosine-3'-phosphate
  modified_base 8: mod_base = OTHER; note = adenosine-3'-phosphate
  modified_base 9: mod_base = OTHER; note = guanosine-3'-phosphate
  modified_base 10: mod_base = OTHER; note = adenosine-3'-phosphate
  modified_base 11: mod_base = OTHER; note = cytidine-3'-phosphate
  modified_base 12: mod_base = OTHER; note = adenosine-3'-phosphate
  modified_base 13: mod_base = OTHER; note = adenosine-3'-phosphate
  modified_base 14: mod_base = OTHER; note = uridine-3'-phosphate
  modified_base 15: mod_base = OTHER; note = cytidine-3'-phosphate
  modified_base 16: mod_base = OTHER; note = uridine-3'-phosphate
  modified_base 17: mod_base = OTHER; note = uridine-3'-phosphate
  modified_base 18: mod_base = OTHER; note = cytidine-3'-phosphate
  modified_base 19: mod_base = OTHER; note = adenosine-3'-phosphate
  misc_feature 1..19: note = RNA
  misc_feature 20..21: note = DNA
tttggaaagacaatcttcatt

SEQ ID NO: 2135 - DNA, 21 bp, synthetic construct
  source 1..21: mol_type = other DNA
  modified_base 1: mod_base = OTHER; note = adenosine-3'-phosphate
  modified_base 2: mod_base = OTHER; note = adenosine-3'-phosphate
  modified_base 3: mod_base = OTHER; note = uridine-3'-phosphate
  modified_base 4: mod_base = OTHER; note = cytidine-3'-phosphate
  modified_base 5: mod_base = OTHER; note = uridine-3'-phosphate
  modified_base 6: mod_base = OTHER; note = uridine-3'-phosphate
  modified_base 7: mod_base = OTHER; note = cytidine-3'-phosphate
  modified_base 8: mod_base = OTHER; note = adenosine-3'-phosphate
  modified_base 9: mod_base = OTHER; note = guanosine-3'-phosphate
  modified_base 10: mod_base = OTHER; note = cytidine-3'-phosphate
  modified_base 11: mod_base = OTHER; note = adenosine-3'-phosphate
  modified_base 12: mod_base = OTHER; note = uridine-3'-phosphate
  modified_base 13: mod_base = OTHER; note = adenosine-3'-phosphate
  modified_base 14: mod_base = OTHER; note = adenosine-3'-phosphate
  modified_base 15: mod_base = OTHER; note = adenosine-3'-phosphate
  modified_base 16: mod_base = OTHER; note = guanosine-3'-phosphate
  modified_base 17: mod_base = OTHER; note = adenosine-3'-phosphate
  modified_base 18: mod_base = OTHER; note = cytidine-3'-phosphate
  modified_base 19: mod_base = OTHER; note = adenosine-3'-phosphate
  misc_feature 1..19: note = RNA
  misc_feature 20..21: note = DNA
aatcttcagcataaagacatt

SEQ ID NO: 2136 - DNA, 21 bp, synthetic construct
  source 1..21: mol_type = other DNA
  modified_base 1: mod_base = OTHER; note = cytidine-3'-phosphate
  modified_base 2: mod_base = OTHER; note = uridine-3'-phosphate
  modified_base 3: mod_base = OTHER; note = cytidine-3'-phosphate
  modified_base 4: mod_base = OTHER; note = uridine-3'-phosphate
  modified_base 5: mod_base = OTHER; note = guanosine-3'-phosphate
  modified_base 6: mod_base = OTHER; note = uridine-3'-phosphate
  modified_base 7: mod_base = OTHER; note = adenosine-3'-phosphate
  modified_base 8: mod_base = OTHER; note = cytidine-3'-phosphate
  modified_base 9: mod_base = OTHER; note = cytidine-3'-phosphate
  modified_base 10: mod_base = OTHER; note = uridine-3'-phosphate
  modified_base 11: mod_base = OTHER; note = adenosine-3'-phosphate
  modified_base 12: mod_base = OTHER; note = adenosine-3'-phosphate
  modified_base 13: mod_base = OTHER; note = cytidine-3'-phosphate
  modified_base 14: mod_base = OTHER; note = adenosine-3'-phosphate
  modified_base 15: mod_base = OTHER; note = cytidine-3'-phosphate
  modified_base 16: mod_base = OTHER; note = uridine-3'-phosphate
  modified_base 17: mod_base = OTHER; note = guanosine-3'-phosphate
  modified_base 18: mod_base = OTHER; note = guanosine-3'-phosphate
  modified_base 19: mod_base = OTHER; note = uridine-3'-phosphate
  misc_feature 1..19: note = RNA
  misc_feature 20..21: note = DNA
ctctgtacctaacactggttt

SEQ ID NO: 2137 - DNA, 21 bp, synthetic construct
  source 1..21: mol_type = other DNA
  modified_base 1: mod_base = OTHER; note = adenosine-3'-phosphate
  modified_base 2: mod_base = OTHER; note = cytidine-3'-phosphate
  modified_base 3: mod_base = OTHER; note = adenosine-3'-phosphate
  modified_base 4: mod_base = OTHER; note = cytidine-3'-phosphate
  modified_base 5: mod_base = OTHER; note = uridine-3'-phosphate
  modified_base 6: mod_base = OTHER; note = guanosine-3'-phosphate
  modified_base 7: mod_base = OTHER; note = guanosine-3'-phosphate
  modified_base 8: mod_base = OTHER; note = uridine-3'-phosphate
  modified_base 9: mod_base = OTHER; note = adenosine-3'-phosphate
  modified_base 10: mod_base = OTHER; note = cytidine-3'-phosphate
  modified_base 11: mod_base = OTHER; note = guanosine-3'-phosphate
  modified_base 12: mod_base = OTHER; note = guanosine-3'-phosphate
  modified_base 13: mod_base = OTHER; note = cytidine-3'-phosphate
  modified_base 14: mod_base = OTHER; note = adenosine-3'-phosphate
  modified_base 15: mod_base = OTHER; note = cytidine-3'-phosphate
  modified_base 16: mod_base = OTHER; note = guanosine-3'-phosphate
  modified_base 17: mod_base = OTHER; note = uridine-3'-phosphate
  modified_base 18: mod_base = OTHER; note = adenosine-3'-phosphate
  modified_base 19: mod_base = OTHER; note = uridine-3'-phosphate
  misc_feature 1..19: note = RNA
  misc_feature 20..21: note = DNA
acactggtacggcacgtattt

SEQ ID NO: 2138 - DNA, 21 bp, synthetic construct
  source 1..21: mol_type = other DNA
  modified_base 1: mod_base = OTHER; note = guanosine-3'-phosphate
  modified_base 2: mod_base = OTHER; note = guanosine-3'-phosphate
  modified_base 3: mod_base = OTHER; note = cytidine-3'-phosphate
  modified_base 4: mod_base = OTHER; note = adenosine-3'-phosphate
  modified_base 5: mod_base = OTHER; note = cytidine-3'-phosphate
  modified_base 6: mod_base = OTHER; note = guanosine-3'-phosphate
  modified_base 7: mod_base = OTHER; note = uridine-3'-phosphate
  modified_base 8: mod_base = OTHER; note = adenosine-3'-phosphate
  modified_base 9: mod_base = OTHER; note = uridine-3'-phosphate
  modified_base 10: mod_base = OTHER; note = guanosine-3'-phosphate
  modified_base 11: mod_base = OTHER; note = guanosine-3'-phosphate
  modified_base 12: mod_base = OTHER; note = uridine-3'-phosphate
  modified_base 13: mod_base = OTHER; note = adenosine-3'-phosphate
  modified_base 14: mod_base = OTHER; note = guanosine-3'-phosphate
  modified_base 15: mod_base = OTHER; note = adenosine-3'-phosphate
  modified_base 16: mod_base = OTHER; note = adenosine-3'-phosphate
  modified_base 17: mod_base = OTHER; note = adenosine-3'-phosphate
  modified_base 18: mod_base = OTHER; note = cytidine-3'-phosphate
  modified_base 19: mod_base = OTHER; note = adenosine-3'-phosphate
  misc_feature 1..19: note = RNA
  misc_feature 20..21: note = DNA
ggcacgtatggtagaaacatt

SEQ ID NO: 2139 - DNA, 21 bp, synthetic construct
  source 1..21: mol_type = other DNA
  modified_base 1: mod_base = OTHER; note = guanosine-3'-phosphate
  modified_base 2: mod_base = OTHER; note = guanosine-3'-phosphate
  modified_base 3: mod_base = OTHER; note = uridine-3'-phosphate
  modified_base 4: mod_base = OTHER; note = adenosine-3'-phosphate
  modified_base 5: mod_base = OTHER; note = guanosine-3'-phosphate
  modified_base 6: mod_base = OTHER; note = adenosine-3'-phosphate
  modified_base 7: mod_base = OTHER; note = adenosine-3'-phosphate
  modified_base 8: mod_base = OTHER; note = adenosine-3'-phosphate
  modified_base 9: mod_base = OTHER; note = cytidine-3'-phosphate
  modified_base 10: mod_base = OTHER; note = adenosine-3'-phosphate
  modified_base 11: mod_base = OTHER; note = adenosine-3'-phosphate
  modified_base 12: mod_base = OTHER; note = cytidine-3'-phosphate
  modified_base 13: mod_base = OTHER; note = uridine-3'-phosphate
  modified_base 14: mod_base = OTHER; note = guanosine-3'-phosphate
  modified_base 15: mod_base = OTHER; note = cytidine-3'-phosphate
  modified_base 16: mod_base = OTHER; note = cytidine-3'-phosphate
  modified_base 17: mod_base = OTHER; note = uridine-3'-phosphate
  modified_base 18: mod_base = OTHER; note = adenosine-3'-phosphate
  modified_base 19: mod_base = OTHER; note = uridine-3'-phosphate
  misc_feature 1..19: note = RNA
  misc_feature 20..21: note = DNA
ggtagaaacaactgcctattt

SEQ ID NO: 2140 - DNA, 21 bp, synthetic construct
  source 1..21: mol_type = other DNA
  modified_base 1: mod_base = OTHER; note = cytidine-3'-phosphate
  modified_base 2: mod_base = OTHER; note = adenosine-3'-phosphate
  modified_base 3: mod_base = OTHER; note = adenosine-3'-phosphate
  modified_base 4: mod_base = OTHER; note = cytidine-3'-phosphate
  modified_base 5: mod_base = OTHER; note = uridine-3'-phosphate
  modified_base 6: mod_base = OTHER; note = guanosine-3'-phosphate
  modified_base 7: mod_base = OTHER; note = cytidine-3'-phosphate
  modified_base 8: mod_base = OTHER; note = cytidine-3'-phosphate
  modified_base 9: mod_base = OTHER; note = uridine-3'-phosphate
  modified_base 10: mod_base = OTHER; note = adenosine-3'-phosphate
  modified_base 11: mod_base = OTHER; note = uridine-3'-phosphate
  modified_base 12: mod_base = OTHER; note = guanosine-3'-phosphate
  modified_base 13: mod_base = OTHER; note = cytidine-3'-phosphate
  modified_base 14: mod_base = OTHER; note = uridine-3'-phosphate
  modified_base 15: mod_base = OTHER; note = uridine-3'-phosphate
  modified_base 16: mod_base = OTHER; note = uridine-3'-phosphate
  modified_base 17: mod_base = OTHER; note = adenosine-3'-phosphate
  modified_base 18: mod_base = OTHER; note = cytidine-3'-phosphate
  modified_base 19: mod_base = OTHER; note = uridine-3'-phosphate
  misc_feature 1..19: note = RNA
  misc_feature 20..21: note = DNA
caactgcctatgctttacttt

SEQ ID NO: 2141 - DNA, 21 bp, synthetic construct
  source 1..21: mol_type = other DNA
  modified_base 1: mod_base = OTHER; note = cytidine-3'-phosphate
  modified_base 2: mod_base = OTHER; note = uridine-3'-phosphate
  modified_base 3: mod_base = OTHER; note = uridine-3'-phosphate
  modified_base 4: mod_base = OTHER; note = uridine-3'-phosphate
  modified_base 5: mod_base = OTHER; note = adenosine-3'-phosphate
  modified_base 6: mod_base = OTHER; note = cytidine-3'-phosphate
  modified_base 7: mod_base = OTHER; note = uridine-3'-phosphate
  modified_base 8: mod_base = OTHER; note = cytidine-3'-phosphate
  modified_base 9: mod_base = OTHER; note = adenosine-3'-phosphate
  modified_base 10: mod_base = OTHER; note = cytidine-3'-phosphate
  modified_base 11: mod_base = OTHER; note = cytidine-3'-phosphate
  modified_base 12: mod_base = OTHER; note = adenosine-3'-phosphate
  modified_base 13: mod_base = OTHER; note = guanosine-3'-phosphate
  modified_base 14: mod_base = OTHER; note = uridine-3'-phosphate
  modified_base 15: mod_base = OTHER; note = cytidine-3'-phosphate
  modified_base 16: mod_base = OTHER; note = uridine-3'-phosphate
  modified_base 17: mod_base = OTHER; note = guanosine-3'-phosphate
  modified_base 18: mod_base = OTHER; note = adenosine-3'-phosphate
  modified_base 19: mod_base = OTHER; note = adenosine-3'-phosphate
  misc_feature 1..19: note = RNA
  misc_feature 20..21: note = DNA
ctttactcaccagtctgaatt

SEQ ID NO: 2142 - DNA, 21 bp, synthetic construct
  source 1..21: mol_type = other DNA
  modified_base 1: mod_base = OTHER; note = guanosine-3'-phosphate
  modified_base 2: mod_base = OTHER; note = uridine-3'-phosphate
  modified_base 3: mod_base = OTHER; note = cytidine-3'-phosphate
  modified_base 4: mod_base = OTHER; note = uridine-3'-phosphate
  modified_base 5: mod_base = OTHER; note = guanosine-3'-phosphate
  modified_base 6: mod_base = OTHER; note = adenosine-3'-phosphate
  modified_base 7: mod_base = OTHER; note = adenosine-3'-phosphate
  modified_base 8: mod_base = OTHER; note = cytidine-3'-phosphate
  modified_base 9: mod_base = OTHER; note = uridine-3'-phosphate
  modified_base 10: mod_base = OTHER; note = uridine-3'-phosphate
  modified_base 11: mod_base = OTHER; note = guanosine-3'-phosphate
  modified_base 12: mod_base = OTHER; note = adenosine-3'-phosphate
  modified_base 13: mod_base = OTHER; note = adenosine-3'-phosphate
  modified_base 14: mod_base = OTHER; note = adenosine-3'-phosphate
  modified_base 15: mod_base = OTHER; note = guanosine-3'-phosphate
  modified_base 16: mod_base = OTHER; note = adenosine-3'-phosphate
  modified_base 17: mod_base = OTHER; note = uridine-3'-phosphate
  modified_base 18: mod_base = OTHER; note = adenosine-3'-phosphate
  modified_base 19: mod_base = OTHER; note = uridine-3'-phosphate
  misc_feature 1..19: note = RNA
  misc_feature 20..21: note = DNA
gtctgaacttgaaagatattt

SEQ ID NO: 2143 - DNA, 21 bp, synthetic construct
  source 1..21: mol_type = other DNA
  modified_base 1: mod_base = OTHER; note = adenosine-3'-phosphate
  modified_base 2: mod_base = OTHER; note = cytidine-3'-phosphate
  modified_base 3: mod_base = OTHER; note = uridine-3'-phosphate
  modified_base 4: mod_base = OTHER; note = uridine-3'-phosphate
  modified_base 5: mod_base = OTHER; note = guanosine-3'-phosphate
  modified_base 6: mod_base = OTHER; note = adenosine-3'-phosphate
  modified_base 7: mod_base = OTHER; note = adenosine-3'-phosphate
  modified_base 8: mod_base = OTHER; note = adenosine-3'-phosphate
  modified_base 9: mod_base = OTHER; note = guanosine-3'-phosphate
  modified_base 10: mod_base = OTHER; note = adenosine-3'-phosphate
  modified_base 11: mod_base = OTHER; note = uridine-3'-phosphate
  modified_base 12: mod_base = OTHER; note = adenosine-3'-phosphate
  modified_base 13: mod_base = OTHER; note = uridine-3'-phosphate
  modified_base 14: mod_base = OTHER; note = adenosine-3'-phosphate
  modified_base 15: mod_base = OTHER; note = adenosine-3'-phosphate
  modified_base 16: mod_base = OTHER; note = adenosine-3'-phosphate
  modified_base 17: mod_base = OTHER; note = uridine-3'-phosphate
  modified_base 18: mod_base = OTHER; note = uridine-3'-phosphate
  modified_base 19: mod_base = OTHER; note = adenosine-3'-phosphate
  misc_feature 1..19: note = RNA
  misc_feature 20..21: note = DNA
acttgaaagatataaattatt

SEQ ID NO: 2144 - DNA, 21 bp, synthetic construct
  source 1..21: mol_type = other DNA
  modified_base 1: mod_base = OTHER; note = uridine-3'-phosphate
  modified_base 2: mod_base = OTHER; note = adenosine-3'-phosphate
  modified_base 3: mod_base = OTHER; note = uridine-3'-phosphate
  modified_base 4: mod_base = OTHER; note = adenosine-3'-phosphate
  modified_base 5: mod_base = OTHER; note = adenosine-3'-phosphate
  modified_base 6: mod_base = OTHER; note = adenosine-3'-phosphate
  modified_base 7: mod_base = OTHER; note = uridine-3'-phosphate
  modified_base 8: mod_base = OTHER; note = uridine-3'-phosphate
  modified_base 9: mod_base = OTHER; note = adenosine-3'-phosphate
  modified_base 10: mod_base = OTHER; note = uridine-3'-phosphate
  modified_base 11: mod_base = OTHER; note = guanosine-3'-phosphate
  modified_base 12: mod_base = OTHER; note = uridine-3'-phosphate
  modified_base 13: mod_base = OTHER; note = uridine-3'-phosphate
  modified_base 14: mod_base = OTHER; note = adenosine-3'-phosphate
  modified_base 15: mod_base = OTHER; note = adenosine-3'-phosphate
  modified_base 16: mod_base = OTHER; note = cytidine-3'-phosphate
  modified_base 17: mod_base = OTHER; note = cytidine-3'-phosphate
  modified_base 18: mod_base = OTHER; note = cytidine-3'-phosphate
  modified_base 19: mod_base = OTHER; note = adenosine-3'-phosphate
  misc_feature 1..19: note = RNA
  misc_feature 20..21: note = DNA
tataaattatgttaacccatt

SEQ ID NO: 2145 - DNA, 21 bp, synthetic construct
  source 1..21: mol_type = other DNA
  modified_base 1: mod_base = OTHER; note = guanosine-3'-phosphate
  modified_base 2: mod_base = OTHER; note = uridine-3'-phosphate
  modified_base 3: mod_base = OTHER; note = uridine-3'-phosphate
  modified_base 4: mod_base = OTHER; note = adenosine-3'-phosphate
  modified_base 5: mod_base = OTHER; note = adenosine-3'-phosphate
  modified_base 6: mod_base = OTHER; note = cytidine-3'-phosphate
  modified_base 7: mod_base = OTHER; note = cytidine-3'-phosphate
  modified_base 8: mod_base = OTHER; note = cytidine-3'-phosphate
  modified_base 9: mod_base = OTHER; note = adenosine-3'-phosphate
  modified_base 10: mod_base = OTHER; note = guanosine-3'-phosphate
  modified_base 11: mod_base = OTHER; note = uridine-3'-phosphate
  modified_base 12: mod_base = OTHER; note = cytidine-3'-phosphate
  modified_base 13: mod_base = OTHER; note = adenosine-3'-phosphate
  modified_base 14: mod_base = OTHER; note = uridine-3'-phosphate
  modified_base 15: mod_base = OTHER; note = cytidine-3'-phosphate
  modified_base 16: mod_base = OTHER; note = adenosine-3'-phosphate
  modified_base 17: mod_base = OTHER; note = adenosine-3'-phosphate
  modified_base 18: mod_base = OTHER; note = adenosine-3'-phosphate
  modified_base 19: mod_base = OTHER; note = uridine-3'-phosphate
  misc_feature 1..19: note = RNA
  misc_feature 20..21: note = DNA
gttaacccagtcatcaaattt

SEQ ID NO: 2146 - DNA, 21 bp, synthetic construct
  source 1..21: mol_type = other DNA
  modified_base 1: mod_base = OTHER; note = uridine-3'-phosphate
  modified_base 2: mod_base = OTHER; note = cytidine-3'-phosphate
  modified_base 3: mod_base = OTHER; note = adenosine-3'-phosphate
  modified_base 4: mod_base = OTHER; note = uridine-3'-phosphate
  modified_base 5: mod_base = OTHER; note = cytidine-3'-phosphate
  modified_base 6: mod_base = OTHER; note = adenosine-3'-phosphate
  modified_base 7: mod_base = OTHER; note = adenosine-3'-phosphate
  modified_base 8: mod_base = OTHER; note = adenosine-3'-phosphate
  modified_base 9: mod_base = OTHER; note = uridine-3'-phosphate
  modified_base 10: mod_base = OTHER; note = guanosine-3'-phosphate
  modified_base 11: mod_base = OTHER; note = guanosine-3'-phosphate
  modified_base 12: mod_base = OTHER; note = cytidine-3'-phosphate
  modified_base 13: mod_base = OTHER; note = uridine-3'-phosphate
  modified_base 14: mod_base = OTHER; note = adenosine-3'-phosphate
  modified_base 15: mod_base = OTHER; note = uridine-3'-phosphate
  modified_base 16: mod_base = OTHER; note = cytidine-3'-phosphate
  modified_base 17: mod_base = OTHER; note = adenosine-3'-phosphate
  modified_base 18: mod_base = OTHER; note = guanosine-3'-phosphate
  modified_base 19: mod_base = OTHER; note = adenosine-3'-phosphate
  misc_feature 1..19: note = RNA
  misc_feature 20..21: note = DNA
tcatcaaatggctatcagatt

SEQ ID NO: 2147 - DNA, 21 bp, synthetic construct
  source 1..21: mol_type = other DNA
  modified_base 1: mod_base = OTHER; note = uridine-3'-phosphate
  modified_base 2: mod_base = OTHER; note = adenosine-3'-phosphate
  modified_base 3: mod_base = OTHER; note = uridine-3'-phosphate
  modified_base 4: mod_base = OTHER; note = cytidine-3'-phosphate
  modified_base 5: mod_base = OTHER; note = adenosine-3'-phosphate
  modified_base 6: mod_base = OTHER; note = guanosine-3'-phosphate
  modified_base 7: mod_base = OTHER; note = adenosine-3'-phosphate
  modified_base 8: mod_base = OTHER; note = adenosine-3'-phosphate
  modified_base 9: mod_base = OTHER; note = guanosine-3'-phosphate
  modified_base 10: mod_base = OTHER; note = adenosine-3'-phosphate
  modified_base 11: mod_base = OTHER; note = guanosine-3'-phosphate
  modified_base 12: mod_base = OTHER; note = cytidine-3'-phosphate
  modified_base 13: mod_base = OTHER; note = adenosine-3'-phosphate
  modified_base 14: mod_base = OTHER; note = guanosine-3'-phosphate
  modified_base 15: mod_base = OTHER; note = adenosine-3'-phosphate
  modified_base 16: mod_base = OTHER; note = guanosine-3'-phosphate
  modified_base 17: mod_base = OTHER; note = guanosine-3'-phosphate
  modified_base 18: mod_base = OTHER; note = uridine-3'-phosphate
  modified_base 19: mod_base = OTHER; note = adenosine-3'-phosphate
  misc_feature 1..19: note = RNA
  misc_feature 20..21: note = DNA
tatcagaagagcagaggtatt

SEQ ID NO: 2148 - DNA, 21 bp, synthetic construct
  source 1..21: mol_type = other DNA
  modified_base 1: mod_base = OTHER; note = adenosine-3'-phosphate
  modified_base 2: mod_base = OTHER; note = guanosine-3'-phosphate
  modified_base 3: mod_base = OTHER; note = adenosine-3'-phosphate
  modified_base 4: mod_base = OTHER; note = guanosine-3'-phosphate
  modified_base 5: mod_base = OTHER; note = guanosine-3'-phosphate
  modified_base 6: mod_base = OTHER; note = uridine-3'-phosphate
  modified_base 7: mod_base = OTHER; note = adenosine-3'-phosphate
  modified_base 8: mod_base = OTHER; note = uridine-3'-phosphate
  modified_base 9: mod_base = OTHER; note = guanosine-3'-phosphate
  modified_base 10: mod_base = OTHER; note = guanosine-3'-phosphate
  modified_base 11: mod_base = OTHER; note = adenosine-3'-phosphate
  modified_base 12: mod_base = OTHER; note = guanosine-3'-phosphate
  modified_base 13: mod_base = OTHER; note = guanosine-3'-phosphate
  modified_base 14: mod_base = OTHER; note = uridine-3'-phosphate
  modified_base 15: mod_base = OTHER; note = guanosine-3'-phosphate
  modified_base 16: mod_base = OTHER; note = guanosine-3'-phosphate
  modified_base 17: mod_base = OTHER; note = cytidine-3'-phosphate
  modified_base 18: mod_base = OTHER; note = uridine-3'-phosphate
  modified_base 19: mod_base = OTHER; note = uridine-3'-phosphate
  misc_feature 1..19: note = RNA
  misc_feature 20..21: note = DNA
agaggtatggaggtggctttt

SEQ ID NO: 2149 - DNA, 21 bp, synthetic construct
  source 1..21: mol_type = other DNA
  modified_base 1: mod_base = OTHER; note = guanosine-3'-phosphate
  modified_base 2: mod_base = OTHER; note = adenosine-3'-phosphate
  modified_base 3: mod_base = OTHER; note = guanosine-3'-phosphate
  modified_base 4: mod_base = OTHER; note = guanosine-3'-phosphate
  modified_base 5: mod_base = OTHER; note = uridine-3'-phosphate
  modified_base 6: mod_base = OTHER; note = guanosine-3'-phosphate
  modified_base 7: mod_base = OTHER; note = guanosine-3'-phosphate
  modified_base 8: mod_base = OTHER; note = cytidine-3'-phosphate
  modified_base 9: mod_base = OTHER; note = uridine-3'-phosphate
  modified_base 10: mod_base = OTHER; note = uridine-3'-phosphate
  modified_base 11: mod_base = OTHER; note = uridine-3'-phosphate
  modified_base 12: mod_base = OTHER; note = uridine-3'-phosphate
  modified_base 13: mod_base = OTHER; note = adenosine-3'-phosphate
  modified_base 14: mod_base = OTHER; note = uridine-3'-phosphate
  modified_base 15: mod_base = OTHER; note = uridine-3'-phosphate
  modified_base 16: mod_base = OTHER; note = cytidine-3'-phosphate
  modified_base 17: mod_base = OTHER; note = adenosine-3'-phosphate
  modified_base 18: mod_base = OTHER; note = adenosine-3'-phosphate
  modified_base 19: mod_base = OTHER; note = cytidine-3'-phosphate
  misc_feature 1..19: note = RNA
  misc_feature 20..21: note = DNA
gaggtggcttttattcaactt

SEQ ID NO: 2150 - DNA, 21 bp, synthetic construct
  source 1..21: mol_type = other DNA
  modified_base 1: mod_base = OTHER; note = uridine-3'-phosphate
  modified_base 2: mod_base = OTHER; note = adenosine-3'-phosphate
  modified_base 3: mod_base = OTHER; note = uridine-3'-phosphate
  modified_base 4: mod_base = OTHER; note = uridine-3'-phosphate
  modified_base 5: mod_base = OTHER; note = cytidine-3'-phosphate
  modified_base 6: mod_base = OTHER; note = adenosine-3'-phosphate
  modified_base 7: mod_base = OTHER; note = adenosine-3'-phosphate
  modified_base 8: mod_base = OTHER; note = cytidine-3'-phosphate
  modified_base 9: mod_base = OTHER; note = cytidine-3'-phosphate
  modified_base 10: mod_base = OTHER; note = cytidine-3'-phosphate
  modified_base 11: mod_base = OTHER; note = adenosine-3'-phosphate
  modified_base 12: mod_base = OTHER; note = guanosine-3'-phosphate
  modified_base 13: mod_base = OTHER; note = guanosine-3'-phosphate
  modified_base 14: mod_base = OTHER; note = adenosine-3'-phosphate
  modified_base 15: mod_base = OTHER; note = cytidine-3'-phosphate
  modified_base 16: mod_base = OTHER; note = adenosine-3'-phosphate
  modified_base 17: mod_base = OTHER; note = cytidine-3'-phosphate
  modified_base 18: mod_base = OTHER; note = adenosine-3'-phosphate
  modified_base 19: mod_base = OTHER; note = adenosine-3'-phosphate
  misc_feature 1..19: note = RNA
  misc_feature 20..21: note = DNA
tattcaacccaggacacaatt

SEQ ID NO: 2151 - DNA, 21 bp, synthetic construct
  source 1..21: mol_type = other DNA
  modified_base 1: mod_base = OTHER; note = adenosine-3'-phosphate
  modified_base 2: mod_base = OTHER; note = guanosine-3'-phosphate
  modified_base 3: mod_base = OTHER; note = guanosine-3'-phosphate
  modified_base 4: mod_base = OTHER; note = adenosine-3'-phosphate
  modified_base 5: mod_base = OTHER; note = cytidine-3'-phosphate
  modified_base 6: mod_base = OTHER; note = adenosine-3'-phosphate
  modified_base 7: mod_base = OTHER; note = cytidine-3'-phosphate
  modified_base 8: mod_base = OTHER; note = adenosine-3'-phosphate
  modified_base 9: mod_base = OTHER; note = adenosine-3'-phosphate
  modified_base 10: mod_base = OTHER; note = uridine-3'-phosphate
  modified_base 11: mod_base = OTHER; note = cytidine-3'-phosphate
  modified_base 12: mod_base = OTHER; note = adenosine-3'-phosphate
  modified_base 13: mod_base = OTHER; note = adenosine-3'-phosphate
  modified_base 14: mod_base = OTHER; note = uridine-3'-phosphate
  modified_base 15: mod_base = OTHER; note = guanosine-3'-phosphate
  modified_base 16: mod_base = OTHER; note = cytidine-3'-phosphate
  modified_base 17: mod_base = OTHER; note = cytidine-3'-phosphate
  modified_base 18: mod_base = OTHER; note = adenosine-3'-phosphate
  modified_base 19: mod_base = OTHER; note = uridine-3'-phosphate
  misc_feature 1..19: note = RNA
  misc_feature 20..21: note = DNA
aggacacaatcaatgccattt

SEQ ID NO: 2152 - DNA, 21 bp, synthetic construct
  source 1..21: mol_type = other DNA
  modified_base 1: mod_base = OTHER; note = cytidine-3'-phosphate
  modified_base 2: mod_base = OTHER; note = adenosine-3'-phosphate
  modified_base 3: mod_base = OTHER; note = adenosine-3'-phosphate
  modified_base 4: mod_base = OTHER; note = uridine-3'-phosphate
  modified_base 5: mod_base = OTHER; note = cytidine-3'-phosphate
  modified_base 6: mod_base = OTHER; note = adenosine-3'-phosphate
  modified_base 7: mod_base = OTHER; note = adenosine-3'-phosphate
  modified_base 8: mod_base = OTHER; note = uridine-3'-phosphate
  modified_base 9: mod_base = OTHER; note = guanosine-3'-phosphate
  modified_base 10: mod_base = OTHER; note = cytidine-3'-phosphate
  modified_base 11: mod_base = OTHER; note = cytidine-3'-phosphate
  modified_base 12: mod_base = OTHER; note = adenosine-3'-phosphate
  modified_base 13: mod_base = OTHER; note = uridine-3'-phosphate
  modified_base 14: mod_base = OTHER; note = uridine-3'-phosphate
  modified_base 15: mod_base = OTHER; note = guanosine-3'-phosphate
  modified_base 16: mod_base = OTHER; note = adenosine-3'-phosphate
  modified_base 17: mod_base = OTHER; note = guanosine-3'-phosphate
  modified_base 18: mod_base = OTHER; note = guanosine-3'-phosphate
  modified_base 19: mod_base = OTHER; note = guanosine-3'-phosphate
  misc_feature 1..19: note = RNA
  misc_feature 20..21: note = DNA
caatcaatgccattgagggtt

SEQ ID NO: 2153 - DNA, 21 bp, synthetic construct
  source 1..21: mol_type = other DNA
  modified_base 1: mod_base = OTHER; note = cytidine-3'-phosphate
  modified_base 2: mod_base = OTHER; note = adenosine-3'-phosphate
  modified_base 3: mod_base = OTHER; note = uridine-3'-phosphate
  modified_base 4: mod_base = OTHER; note = uridine-3'-phosphate
  modified_base 5: mod_base = OTHER; note = guanosine-3'-phosphate
  modified_base 6: mod_base = OTHER; note = adenosine-3'-phosphate
  modified_base 7: mod_base = OTHER; note = guanosine-3'-phosphate
  modified_base 8: mod_base = OTHER; note = guanosine-3'-phosphate
  modified_base 9: mod_base = OTHER; note = guanosine-3'-phosphate
  modified_base 10: mod_base = OTHER; note = cytidine-3'-phosphate
  modified_base 11: mod_base = OTHER; note = cytidine-3'-phosphate
  modified_base 12: mod_base = OTHER; note = uridine-3'-phosphate
  modified_base 13: mod_base = OTHER; note = guanosine-3'-phosphate
  modified_base 14: mod_base = OTHER; note = adenosine-3'-phosphate
  modified_base 15: mod_base = OTHER; note = cytidine-3'-phosphate
  modified_base 16: mod_base = OTHER; note = guanosine-3'-phosphate
  modified_base 17: mod_base = OTHER; note = guanosine-3'-phosphate
  modified_base 18: mod_base = OTHER; note = adenosine-3'-phosphate
  modified_base 19: mod_base = OTHER; note = adenosine-3'-phosphate
  misc_feature 1..19: note = RNA
  misc_feature 20..21: note = DNA
cattgagggcctgacggaatt

SEQ ID NO: 2154 - DNA, 21 bp, synthetic construct
  source 1..21: mol_type = other DNA
  modified_base 1: mod_base = OTHER; note = adenosine-3'-phosphate
  modified_base 2: mod_base = OTHER; note = cytidine-3'-phosphate
  modified_base 3: mod_base = OTHER; note = guanosine-3'-phosphate
  modified_base 4: mod_base = OTHER; note = guanosine-3'-phosphate
  modified_base 5: mod_base = OTHER; note = adenosine-3'-phosphate
  modified_base 6: mod_base = OTHER; note = adenosine-3'-phosphate
  modified_base 7: mod_base = OTHER; note = uridine-3'-phosphate
  modified_base 8: mod_base = OTHER; note = adenosine-3'-phosphate
  modified_base 9: mod_base = OTHER; note = uridine-3'-phosphate
  modified_base 10: mod_base = OTHER; note = uridine-3'-phosphate
  modified_base 11: mod_base = OTHER; note = cytidine-3'-phosphate
  modified_base 12: mod_base = OTHER; note = adenosine-3'-phosphate
  modified_base 13: mod_base = OTHER; note = cytidine-3'-phosphate
  modified_base 14: mod_base = OTHER; note = uridine-3'-phosphate
  modified_base 15: mod_base = OTHER; note = cytidine-3'-phosphate
  modified_base 16: mod_base = OTHER; note = cytidine-3'-phosphate
  modified_base 17: mod_base = OTHER; note = uridine-3'-phosphate
  modified_base 18: mod_base = OTHER; note = guanosine-3'-phosphate
  modified_base 19: mod_base = OTHER; note = guanosine-3'-phosphate
  misc_feature 1..19: note = RNA
  misc_feature 20..21: note = DNA
acggaatattcactcctggtt

SEQ ID NO: 2155 - DNA, 21 bp, synthetic construct
  source 1..21: mol_type = other DNA
  modified_base 1: mod_base = OTHER; note = uridine-3'-phosphate
  modified_base 2: mod_base = OTHER; note = uridine-3'-phosphate
  modified_base 3: mod_base = OTHER; note = cytidine-3'-phosphate
  modified_base 4: mod_base = OTHER; note = adenosine-3'-phosphate
  modified_base 5: mod_base = OTHER; note = cytidine-3'-phosphate
  modified_base 6: mod_base = OTHER; note = uridine-3'-phosphate
  modified_base 7: mod_base = OTHER; note = cytidine-3'-phosphate
  modified_base 8: mod_base = OTHER; note = cytidine-3'-phosphate
  modified_base 9: mod_base = OTHER; note = uridine-3'-phosphate
  modified_base 10: mod_base = OTHER; note = guanosine-3'-phosphate
  modified_base 11: mod_base = OTHER; note = guanosine-3'-phosphate
  modified_base 12: mod_base = OTHER; note = uridine-3'-phosphate
  modified_base 13: mod_base = OTHER; note = uridine-3'-phosphate
  modified_base 14: mod_base = OTHER; note = adenosine-3'-phosphate
  modified_base 15: mod_base = OTHER; note = adenosine-3'-phosphate
  modified_base 16: mod_base = OTHER; note = adenosine-3'-phosphate
  modified_base 17: mod_base = OTHER; note = cytidine-3'-phosphate
  modified_base 18: mod_base = OTHER; note = adenosine-3'-phosphate
  modified_base 19: mod_base = OTHER; note = adenosine-3'-phosphate
  misc_feature 1..19: note = RNA
  misc_feature 20..21: note = DNA
ttcactcctggttaaacaatt

SEQ ID NO: 2156 - DNA, 21 bp, synthetic construct
  source 1..21: mol_type = other DNA
  modified_base 1: mod_base = OTHER; note = guanosine-3'-phosphate
  modified_base 2: mod_base = OTHER; note = guanosine-3'-phosphate
  modified_base 3: mod_base = OTHER; note = uridine-3'-phosphate
  modified_base 4: mod_base = OTHER; note = uridine-3'-phosphate
  modified_base 5: mod_base = OTHER; note = adenosine-3'-phosphate
  modified_base 6: mod_base = OTHER; note = adenosine-3'-phosphate
  modified_base 7: mod_base = OTHER; note = adenosine-3'-phosphate
  modified_base 8: mod_base = OTHER; note = cytidine-3'-phosphate
  modified_base 9: mod_base = OTHER; note = adenosine-3'-phosphate
  modified_base 10: mod_base = OTHER; note = adenosine-3'-phosphate
  modified_base 11: mod_base = OTHER; note = cytidine-3'-phosphate
  modified_base 12: mod_base = OTHER; note = uridine-3'-phosphate
  modified_base 13: mod_base = OTHER; note = cytidine-3'-phosphate
  modified_base 14: mod_base = OTHER; note = cytidine-3'-phosphate
  modified_base 15: mod_base = OTHER; note = guanosine-3'-phosphate
  modified_base 16: mod_base = OTHER; note = cytidine-3'-phosphate
  modified_base 17: mod_base = OTHER; note = uridine-3'-phosphate
  modified_base 18: mod_base = OTHER; note = uridine-3'-phosphate
  modified_base 19: mod_base = OTHER; note = guanosine-3'-phosphate
  misc_feature 1..19: note = RNA
  misc_feature 20..21: note = DNA
ggttaaacaactccgcttgtt

SEQ ID NO: 2157 - DNA, 21 bp, synthetic construct
  source 1..21: mol_type = other DNA
  modified_base 1: mod_base = OTHER; note = cytidine-3'-phosphate
  modified_base 2: mod_base = OTHER; note = cytidine-3'-phosphate
  modified_base 3: mod_base = OTHER; note = guanosine-3'-phosphate
  modified_base 4: mod_base = OTHER; note = cytidine-3'-phosphate
  modified_base 5: mod_base = OTHER; note = uridine-3'-phosphate
  modified_base 6: mod_base = OTHER; note = uridine-3'-phosphate
  modified_base 7: mod_base = OTHER; note = guanosine-3'-phosphate
  modified_base 8: mod_base = OTHER; note = adenosine-3'-phosphate
  modified_base 9: mod_base = OTHER; note = guanosine-3'-phosphate
  modified_base 10: mod_base = OTHER; note = uridine-3'-phosphate
  modified_base 11: mod_base = OTHER; note = adenosine-3'-phosphate
  modified_base 12: mod_base = OTHER; note = uridine-3'-phosphate
  modified_base 13: mod_base = OTHER; note = guanosine-3'-phosphate
  modified_base 14: mod_base = OTHER; note = guanosine-3'-phosphate
  modified_base 15: mod_base = OTHER; note = adenosine-3'-phosphate
  modified_base 16: mod_base = OTHER; note = cytidine-3'-phosphate
  modified_base 17: mod_base = OTHER; note = adenosine-3'-phosphate
  modified_base 18: mod_base = OTHER; note = uridine-3'-phosphate
  modified_base 19: mod_base = OTHER; note = cytidine-3'-phosphate
  misc_feature 1..19: note = RNA
  misc_feature 20..21: note = DNA
ccgcttgagtatggacatctt

SEQ ID NO: 2158 - DNA, 21 bp, synthetic construct
  source 1..21: mol_type = other DNA
  modified_base 1: mod_base = OTHER; note = guanosine-3'-phosphate
  modified_base 2: mod_base = OTHER; note = guanosine-3'-phosphate
  modified_base 3: mod_base = OTHER; note = adenosine-3'-phosphate
  modified_base 4: mod_base = OTHER; note = cytidine-3'-phosphate
  modified_base 5: mod_base = OTHER; note = adenosine-3'-phosphate
  modified_base 6: mod_base = OTHER; note = uridine-3'-phosphate
  modified_base 7: mod_base = OTHER; note = cytidine-3'-phosphate
  modified_base 8: mod_base = OTHER; note = guanosine-3'-phosphate
  modified_base 9: mod_base = OTHER; note = adenosine-3'-phosphate
  modified_base 10: mod_base = OTHER; note = uridine-3'-phosphate
  modified_base 11: mod_base = OTHER; note = guanosine-3'-phosphate
  modified_base 12: mod_base = OTHER; note = uridine-3'-phosphate
  modified_base 13: mod_base = OTHER; note = uridine-3'-phosphate
  modified_base 14: mod_base = OTHER; note = uridine-3'-phosphate
  modified_base 15: mod_base = OTHER; note = cytidine-3'-phosphate
  modified_base 16: mod_base = OTHER; note = uridine-3'-phosphate
  modified_base 17: mod_base = OTHER; note = uridine-3'-phosphate
  modified_base 18: mod_base = OTHER; note = adenosine-3'-phosphate
  modified_base 19: mod_base = OTHER; note = cytidine-3'-phosphate
  misc_feature 1..19: note = RNA
  misc_feature 20..21: note = DNA
ggacatcgatgtttcttactt

SEQ ID NO: 2159 - DNA, 21 bp, synthetic construct
  source 1..21: mol_type = other DNA
  modified_base 1: mod_base = OTHER; note = cytidine-3'-phosphate
  modified_base 2: mod_base = OTHER; note = guanosine-3'-phosphate
  modified_base 3: mod_base = OTHER; note = adenosine-3'-phosphate
  modified_base 4: mod_base = OTHER; note = uridine-3'-phosphate
  modified_base 5: mod_base = OTHER; note = guanosine-3'-phosphate
  modified_base 6: mod_base = OTHER; note = uridine-3'-phosphate
  modified_base 7: mod_base = OTHER; note = uridine-3'-phosphate
  modified_base 8: mod_base = OTHER; note = uridine-3'-phosphate
  modified_base 9: mod_base = OTHER; note = cytidine-3'-phosphate
  modified_base 10: mod_base = OTHER; note = uridine-3'-phosphate
  modified_base 11: mod_base = OTHER; note = uridine-3'-phosphate
  modified_base 12: mod_base = OTHER; note = adenosine-3'-phosphate
  modified_base 13: mod_base = OTHER; note = cytidine-3'-phosphate
  modified_base 14: mod_base = OTHER; note = adenosine-3'-phosphate
  modified_base 15: mod_base = OTHER; note = adenosine-3'-phosphate
  modified_base 16: mod_base = OTHER; note = guanosine-3'-phosphate
  modified_base 17: mod_base = OTHER; note = cytidine-3'-phosphate
  modified_base 18: mod_base = OTHER; note = adenosine-3'-phosphate
  modified_base 19: mod_base = OTHER; note = uridine-3'-phosphate
  misc_feature 1..19: note = RNA
  misc_feature 20..21: note = DNA
cgatgtttcttacaagcattt

SEQ ID NO: 2160 - DNA, 21 bp, synthetic construct
  source 1..21: mol_type = other DNA
  modified_base 1: mod_base = OTHER; note = cytidine-3'-phosphate
  modified_base 2: mod_base = OTHER; note = adenosine-3'-phosphate
  modified_base 3: mod_base = OTHER; note = adenosine-3'-phosphate
  modified_base 4: mod_base = OTHER; note = guanosine-3'-phosphate
  modified_base 5: mod_base = OTHER; note = cytidine-3'-phosphate
  modified_base 6: mod_base = OTHER; note = adenosine-3'-phosphate
  modified_base 7: mod_base = OTHER; note = uridine-3'-phosphate
  modified_base 8: mod_base = OTHER; note = adenosine-3'-phosphate
  modified_base 9: mod_base = OTHER; note = adenosine-3'-phosphate
  modified_base 10: mod_base = OTHER; note = adenosine-3'-phosphate
  modified_base 11: mod_base = OTHER; note = guanosine-3'-phosphate
  modified_base 12: mod_base = OTHER; note = guanosine-3'-phosphate
  modified_base 13: mod_base = OTHER; note = uridine-3'-phosphate
  modified_base 14: mod_base = OTHER; note = guanosine-3'-phosphate
  modified_base 15: mod_base = OTHER; note = cytidine-3'-phosphate
  modified_base 16: mod_base = OTHER; note = cytidine-3'-phosphate
  modified_base 17: mod_base = OTHER; note = uridine-3'-phosphate
  modified_base 18: mod_base = OTHER; note = uridine-3'-phosphate
  modified_base 19: mod_base = OTHER; note = adenosine-3'-phosphate
  misc_feature 1..19: note = RNA
  misc_feature 20..21: note = DNA
caagcataaaggtgccttatt

SEQ ID NO: 2161 - DNA, 21 bp, synthetic construct
  source 1..21: mol_type = other DNA
  modified_base 1: mod_base = OTHER; note = guanosine-3'-phosphate
  modified_base 2: mod_base = OTHER; note = uridine-3'-phosphate
  modified_base 3: mod_base = OTHER; note = guanosine-3'-phosphate
  modified_base 4: mod_base = OTHER; note = cytidine-3'-phosphate
  modified_base 5: mod_base = OTHER; note = cytidine-3'-phosphate
  modified_base 6: mod_base = OTHER; note = uridine-3'-phosphate
  modified_base 7: mod_base = OTHER; note = uridine-3'-phosphate
  modified_base 8: mod_base = OTHER; note = adenosine-3'-phosphate
  modified_base 9: mod_base = OTHER; note = cytidine-3'-phosphate
  modified_base 10: mod_base = OTHER; note = adenosine-3'-phosphate
  modified_base 11: mod_base = OTHER; note = uridine-3'-phosphate
  modified_base 12: mod_base = OTHER; note = adenosine-3'-phosphate
  modified_base 13: mod_base = OTHER; note = adenosine-3'-phosphate
  modified_base 14: mod_base = OTHER; note = uridine-3'-phosphate
  modified_base 15: mod_base = OTHER; note = uridine-3'-phosphate
  modified_base 16: mod_base = OTHER; note = adenosine-3'-phosphate
  modified_base 17: mod_base = OTHER; note = uridine-3'-phosphate
  modified_base 18: mod_base = OTHER; note = adenosine-3'-phosphate
  modified_base 19: mod_base = OTHER; note = adenosine-3'-phosphate
  misc_feature 1..19: note = RNA
  misc_feature 20..21: note = DNA
gtgccttacataattataatt

SEQ ID NO: 2162 - DNA, 21 bp, synthetic construct
  source 1..21: mol_type = other DNA
  modified_base 1: mod_base = OTHER; note = adenosine-3'-phosphate
  modified_base 2: mod_base = OTHER; note = cytidine-3'-phosphate
  modified_base 3: mod_base = OTHER; note = adenosine-3'-phosphate
  modified_base 4: mod_base = OTHER; note = uridine-3'-phosphate
  modified_base 5: mod_base = OTHER; note = adenosine-3'-phosphate
  modified_base 6: mod_base = OTHER; note = adenosine-3'-phosphate
  modified_base 7: mod_base = OTHER; note = uridine-3'-phosphate
  modified_base 8: mod_base = OTHER; note = uridine-3'-phosphate
  modified_base 9: mod_base = OTHER; note = adenosine-3'-phosphate
  modified_base 10: mod_base = OTHER; note = uridine-3'-phosphate
  modified_base 11: mod_base = OTHER; note = adenosine-3'-phosphate
  modified_base 12: mod_base = OTHER; note = adenosine-3'-phosphate
  modified_base 13: mod_base = OTHER; note = adenosine-3'-phosphate
  modified_base 14: mod_base = OTHER; note = adenosine-3'-phosphate
  modified_base 15: mod_base = OTHER; note = uridine-3'-phosphate
  modified_base 16: mod_base = OTHER; note = guanosine-3'-phosphate
  modified_base 17: mod_base = OTHER; note = adenosine-3'-phosphate
  modified_base 18: mod_base = OTHER; note = cytidine-3'-phosphate
  modified_base 19: mod_base = OTHER; note = adenosine-3'-phosphate
  misc_feature 1..19: note = RNA
  misc_feature 20..21: note = DNA
acataattataaaatgacatt

SEQ ID NO: 2163 - DNA, 21 bp, synthetic construct
  source 1..21: mol_type = other DNA
  modified_base 1: mod_base = OTHER; note = adenosine-3'-phosphate
  modified_base 2: mod_base = OTHER; note = adenosine-3'-phosphate
  modified_base 3: mod_base = OTHER; note = adenosine-3'-phosphate
  modified_base 4: mod_base = OTHER; note = adenosine-3'-phosphate
  modified_base 5: mod_base = OTHER; note = uridine-3'-phosphate
  modified_base 6: mod_base = OTHER; note = guanosine-3'-phosphate
  modified_base 7: mod_base = OTHER; note = adenosine-3'-phosphate
  modified_base 8: mod_base = OTHER; note = cytidine-3'-phosphate
  modified_base 9: mod_base = OTHER; note = adenosine-3'-phosphate
  modified_base 10: mod_base = OTHER; note = guanosine-3'-phosphate
  modified_base 11: mod_base = OTHER; note = adenosine-3'-phosphate
  modified_base 12: mod_base = OTHER; note = cytidine-3'-phosphate
  modified_base 13: mod_base = OTHER; note = adenosine-3'-phosphate
  modified_base 14: mod_base = OTHER; note = adenosine-3'-phosphate
  modified_base 15: mod_base = OTHER; note = guanosine-3'-phosphate
  modified_base 16: mod_base = OTHER; note = adenosine-3'-phosphate
  modified_base 17: mod_base = OTHER; note = adenosine-3'-phosphate
  modified_base 18: mod_base = OTHER; note = uridine-3'-phosphate
  modified_base 19: mod_base = OTHER; note = uridine-3'-phosphate
  misc_feature 1..19: note = RNA
  misc_feature 20..21: note = DNA
aaaatgacagacaagaatttt

SEQ ID NO: 2164 - DNA, 21 bp, synthetic construct
  source 1..21: mol_type = other DNA
  modified_base 1: mod_base = OTHER; note = cytidine-3'-phosphate
  modified_base 2: mod_base = OTHER; note = adenosine-3'-phosphate
  modified_base 3: mod_base = OTHER; note = adenosine-3'-phosphate
  modified_base 4: mod_base = OTHER; note = guanosine-3'-phosphate
  modified_base 5: mod_base = OTHER; note = adenosine-3'-phosphate
  modified_base 6: mod_base = OTHER; note = adenosine-3'-phosphate
  modified_base 7: mod_base = OTHER; note = uridine-3'-phosphate
  modified_base 8: mod_base = OTHER; note = uridine-3'-phosphate
  modified_base 9: mod_base = OTHER; note = uridine-3'-phosphate
  modified_base 10: mod_base = OTHER; note = cytidine-3'-phosphate
  modified_base 11: mod_base = OTHER; note = cytidine-3'-phosphate
  modified_base 12: mod_base = OTHER; note = uridine-3'-phosphate
  modified_base 13: mod_base = OTHER; note = uridine-3'-phosphate
  modified_base 14: mod_base = OTHER; note = guanosine-3'-phosphate
  modified_base 15: mod_base = OTHER; note = guanosine-3'-phosphate
  modified_base 16: mod_base = OTHER; note = guanosine-3'-phosphate
  modified_base 17: mod_base = OTHER; note = adenosine-3'-phosphate
  modified_base 18: mod_base = OTHER; note = guanosine-3'-phosphate
  modified_base 19: mod_base = OTHER; note = guanosine-3'-phosphate
  misc_feature 1..19: note = RNA
  misc_feature 20..21: note = DNA
caagaatttccttgggaggtt

SEQ ID NO: 2165 - DNA, 21 bp, synthetic construct
  source 1..21: mol_type = other DNA
  modified_base 1: mod_base = OTHER; note = cytidine-3'-phosphate
  modified_base 2: mod_base = OTHER; note = cytidine-3'-phosphate
  modified_base 3: mod_base = OTHER; note = uridine-3'-phosphate
  modified_base 4: mod_base = OTHER; note = uridine-3'-phosphate
  modified_base 5: mod_base = OTHER; note = guanosine-3'-phosphate
  modified_base 6: mod_base = OTHER; note = guanosine-3'-phosphate
  modified_base 7: mod_base = OTHER; note = guanosine-3'-phosphate
  modified_base 8: mod_base = OTHER; note = adenosine-3'-phosphate
  modified_base 9: mod_base = OTHER; note = guanosine-3'-phosphate
  modified_base 10: mod_base = OTHER; note = guanosine-3'-phosphate
  modified_base 11: mod_base = OTHER; note = cytidine-3'-phosphate
  modified_base 12: mod_base = OTHER; note = cytidine-3'-phosphate
  modified_base 13: mod_base = OTHER; note = adenosine-3'-phosphate
  modified_base 14: mod_base = OTHER; note = guanosine-3'-phosphate
  modified_base 15: mod_base = OTHER; note = uridine-3'-phosphate
  modified_base 16: mod_base = OTHER; note = adenosine-3'-phosphate
  modified_base 17: mod_base = OTHER; note = guanosine-3'-phosphate
  modified_base 18: mod_base = OTHER; note = adenosine-3'-phosphate
  modified_base 19: mod_base = OTHER; note = guanosine-3'-phosphate
  misc_feature 1..19: note = RNA
  misc_feature 20..21: note = DNA
ccttgggaggccagtagagtt

SEQ ID NO: 2166 - DNA, 21 bp, synthetic construct
  source 1..21: mol_type = other DNA
  modified_base 1: mod_base = OTHER; note = adenosine-3'-phosphate
  modified_base 2: mod_base = OTHER; note = guanosine-3'-phosphate
  modified_base 3: mod_base = OTHER; note = uridine-3'-phosphate
  modified_base 4: mod_base = OTHER; note = adenosine-3'-phosphate
  modified_base 5: mod_base = OTHER; note = guanosine-3'-phosphate
  modified_base 6: mod_base = OTHER; note = adenosine-3'-phosphate
  modified_base 7: mod_base = OTHER; note = guanosine-3'-phosphate
  modified_base 8: mod_base = OTHER; note = guanosine-3'-phosphate
  modified_base 9: mod_base = OTHER; note = uridine-3'-phosphate
  modified_base 10: mod_base = OTHER; note = guanosine-3'-phosphate
  modified_base 11: mod_base = OTHER; note = cytidine-3'-phosphate
  modified_base 12: mod_base = OTHER; note = uridine-3'-phosphate
  modified_base 13: mod_base = OTHER; note = uridine-3'-phosphate
  modified_base 14: mod_base = OTHER; note = cytidine-3'-phosphate
  modified_base 15: mod_base = OTHER; note = uridine-3'-phosphate
  modified_base 16: mod_base = OTHER; note = cytidine-3'-phosphate
  modified_base 17: mod_base = OTHER; note = adenosine-3'-phosphate
  modified_base 18: mod_base = OTHER; note = adenosine-3'-phosphate
  modified_base 19: mod_base = OTHER; note = uridine-3'-phosphate
  misc_feature 1..19: note = RNA
  misc_feature 20..21: note = DNA
agtagaggtgcttctcaattt

SEQ ID NO: 2167 - DNA, 21 bp, synthetic construct
  source 1..21: mol_type = other DNA
  modified_base 1: mod_base = OTHER; note = cytidine-3'-phosphate
  modified_base 2: mod_base = OTHER; note = uridine-3'-phosphate
  modified_base 3: mod_base = OTHER; note = uridine-3'-phosphate
  modified_base 4: mod_base = OTHER; note = cytidine-3'-phosphate
  modified_base 5: mod_base = OTHER; note = uridine-3'-phosphate
  modified_base 6: mod_base = OTHER; note = cytidine-3'-phosphate
  modified_base 7: mod_base = OTHER; note = adenosine-3'-phosphate
  modified_base 8: mod_base = OTHER; note = adenosine-3'-phosphate
  modified_base 9: mod_base = OTHER; note = uridine-3'-phosphate
  modified_base 10: mod_base = OTHER; note = guanosine-3'-phosphate
  modified_base 11: mod_base = OTHER; note = adenosine-3'-phosphate
  modified_base 12: mod_base = OTHER; note = uridine-3'-phosphate
  modified_base 13: mod_base = OTHER; note = guanosine-3'-phosphate
  modified_base 14: mod_base = OTHER; note = adenosine-3'-phosphate
  modified_base 15: mod_base = OTHER; note = cytidine-3'-phosphate
  modified_base 16: mod_base = OTHER; note = cytidine-3'-phosphate
  modified_base 17: mod_base = OTHER; note = uridine-3'-phosphate
  modified_base 18: mod_base = OTHER; note = cytidine-3'-phosphate
  modified_base 19: mod_base = OTHER; note = adenosine-3'-phosphate
  misc_feature 1..19: note = RNA
  misc_feature 20..21: note = DNA
cttctcaatgatgacctcatt

SEQ ID NO: 2168 - DNA, 21 bp, synthetic construct
  source 1..21: mol_type = other DNA
  modified_base 1: mod_base = OTHER; note = uridine-3'-phosphate
  modified_base 2: mod_base = OTHER; note = guanosine-3'-phosphate
  modified_base 3: mod_base = OTHER; note = adenosine-3'-phosphate
  modified_base 4: mod_base = OTHER; note = cytidine-3'-phosphate
  modified_base 5: mod_base = OTHER; note = cytidine-3'-phosphate
  modified_base 6: mod_base = OTHER; note = uridine-3'-phosphate
  modified_base 7: mod_base = OTHER; note = cytidine-3'-phosphate
  modified_base 8: mod_base = OTHER; note = adenosine-3'-phosphate
  modified_base 9: mod_base = OTHER; note = uridine-3'-phosphate
  modified_base 10: mod_base = OTHER; note = uridine-3'-phosphate
  modified_base 11: mod_base = OTHER; note = guanosine-3'-phosphate
  modified_base 12: mod_base = OTHER; note = uridine-3'-phosphate
  modified_base 13: mod_base = OTHER; note = cytidine-3'-phosphate
  modified_base 14: mod_base = OTHER; note = adenosine-3'-phosphate
  modified_base 15: mod_base = OTHER; note = guanosine-3'-phosphate
  modified_base 16: mod_base = OTHER; note = uridine-3'-phosphate
  modified_base 17: mod_base = OTHER; note = adenosine-3'-phosphate
  modified_base 18: mod_base = OTHER; note = cytidine-3'-phosphate
  modified_base 19: mod_base = OTHER; note = adenosine-3'-phosphate
  misc_feature 1..19: note = RNA
  misc_feature 20..21: note = DNA
tgacctcattgtcagtacatt

SEQ ID NO: 2169 - DNA, 21 bp, synthetic construct
  source 1..21: mol_type = other DNA
  modified_base 1: mod_base = OTHER; note = guanosine-3'-phosphate
  modified_base 2: mod_base = OTHER; note = uridine-3'-phosphate
  modified_base 3: mod_base = OTHER; note = cytidine-3'-phosphate
  modified_base 4: mod_base = OTHER; note = adenosine-3'-phosphate
  modified_base 5: mod_base = OTHER; note = guanosine-3'-phosphate
  modified_base 6: mod_base = OTHER; note = uridine-3'-phosphate
  modified_base 7: mod_base = OTHER; note = adenosine-3'-phosphate
  modified_base 8: mod_base = OTHER; note = cytidine-3'-phosphate
  modified_base 9: mod_base = OTHER; note = adenosine-3'-phosphate
  modified_base 10: mod_base = OTHER; note = guanosine-3'-phosphate
  modified_base 11: mod_base = OTHER; note = guanosine-3'-phosphate
  modified_base 12: mod_base = OTHER; note = adenosine-3'-phosphate
  modified_base 13: mod_base = OTHER; note = uridine-3'-phosphate
  modified_base 14: mod_base = OTHER; note = uridine-3'-phosphate
  modified_base 15: mod_base = OTHER; note = uridine-3'-phosphate
  modified_base 16: mod_base = OTHER; note = guanosine-3'-phosphate
  modified_base 17: mod_base = OTHER; note = guanosine-3'-phosphate
  modified_base 18: mod_base = OTHER; note = cytidine-3'-phosphate
  modified_base 19: mod_base = OTHER; note = adenosine-3'-phosphate
  misc_feature 1..19: note = RNA
  misc_feature 20..21: note = DNA
gtcagtacaggatttggcatt

SEQ ID NO: 2170 - DNA, 21 bp, synthetic construct
  source 1..21: mol_type = other DNA
  modified_base 1: mod_base = OTHER; note = adenosine-3'-phosphate
  modified_base 2: mod_base = OTHER; note = guanosine-3'-phosphate
  modified_base 3: mod_base = OTHER; note = guanosine-3'-phosphate
  modified_base 4: mod_base = OTHER; note = adenosine-3'-phosphate
  modified_base 5: mod_base = OTHER; note = uridine-3'-phosphate
  modified_base 6: mod_base = OTHER; note = uridine-3'-phosphate
  modified_base 7: mod_base = OTHER; note = uridine-3'-phosphate
  modified_base 8: mod_base = OTHER; note = guanosine-3'-phosphate
  modified_base 9: mod_base = OTHER; note = guanosine-3'-phosphate
  modified_base 10: mod_base = OTHER; note = cytidine-3'-phosphate
  modified_base 11: mod_base = OTHER; note = adenosine-3'-phosphate
  modified_base 12: mod_base = OTHER; note = guanosine-3'-phosphate
  modified_base 13: mod_base = OTHER; note = uridine-3'-phosphate
  modified_base 14: mod_base = OTHER; note = guanosine-3'-phosphate
  modified_base 15: mod_base = OTHER; note = guanosine-3'-phosphate
  modified_base 16: mod_base = OTHER; note = cytidine-3'-phosphate
  modified_base 17: mod_base = OTHER; note = uridine-3'-phosphate
  modified_base 18: mod_base = OTHER; note = uridine-3'-phosphate
  modified_base 19: mod_base = OTHER; note = guanosine-3'-phosphate
  misc_feature 1..19: note = RNA
  misc_feature 20..21: note = DNA
aggatttggcagtggcttgtt

SEQ ID NO: 2171 - DNA, 21 bp, synthetic construct
  source 1..21: mol_type = other DNA
  modified_base 1: mod_base = OTHER; note = uridine-3'-phosphate
  modified_base 2: mod_base = OTHER; note = guanosine-3'-phosphate
  modified_base 3: mod_base = OTHER; note = guanosine-3'-phosphate
  modified_base 4: mod_base = OTHER; note = cytidine-3'-phosphate
  modified_base 5: mod_base = OTHER; note = uridine-3'-phosphate
  modified_base 6: mod_base = OTHER; note = uridine-3'-phosphate
  modified_base 7: mod_base = OTHER; note = guanosine-3'-phosphate
  modified_base 8: mod_base = OTHER; note = guanosine-3'-phosphate
  modified_base 9: mod_base = OTHER; note = cytidine-3'-phosphate
  modified_base 10: mod_base = OTHER; note = uridine-3'-phosphate
  modified_base 11: mod_base = OTHER; note = adenosine-3'-phosphate
  modified_base 12: mod_base = OTHER; note = cytidine-3'-phosphate
  modified_base 13: mod_base = OTHER; note = adenosine-3'-phosphate
  modified_base 14: mod_base = OTHER; note = guanosine-3'-phosphate
  modified_base 15: mod_base = OTHER; note = uridine-3'-phosphate
  modified_base 16: mod_base = OTHER; note = adenosine-3'-phosphate
  modified_base 17: mod_base = OTHER; note = cytidine-3'-phosphate
  modified_base 18: mod_base = OTHER; note = adenosine-3'-phosphate
  modified_base 19: mod_base = OTHER; note = uridine-3'-phosphate
  misc_feature 1..19: note = RNA
  misc_feature 20..21: note = DNA
tggcttggctacagtacattt

SEQ ID NO: 2172 - DNA, 21 bp, synthetic construct
  source 1..21: mol_type = other DNA
  modified_base 1: mod_base = OTHER; note = guanosine-3'-phosphate
  modified_base 2: mod_base = OTHER; note = cytidine-3'-phosphate
  modified_base 3: mod_base = OTHER; note = uridine-3'-phosphate
  modified_base 4: mod_base = OTHER; note = adenosine-3'-phosphate
  modified_base 5: mod_base = OTHER; note = cytidine-3'-phosphate
  modified_base 6: mod_base = OTHER; note = adenosine-3'-phosphate
  modified_base 7: mod_base = OTHER; note = guanosine-3'-phosphate
  modified_base 8: mod_base = OTHER; note = uridine-3'-phosphate
  modified_base 9: mod_base = OTHER; note = adenosine-3'-phosphate
  modified_base 10: mod_base = OTHER; note = cytidine-3'-phosphate
  modified_base 11: mod_base = OTHER; note = adenosine-3'-phosphate
  modified_base 12: mod_base = OTHER; note = uridine-3'-phosphate
  modified_base 13: mod_base = OTHER; note = guanosine-3'-phosphate
  modified_base 14: mod_base = OTHER; note = uridine-3'-phosphate
  modified_base 15: mod_base = OTHER; note = adenosine-3'-phosphate
  modified_base 16: mod_base = OTHER; note = adenosine-3'-phosphate
  modified_base 17: mod_base = OTHER; note = cytidine-3'-phosphate
  modified_base 18: mod_base = OTHER; note = adenosine-3'-phosphate
  modified_base 19: mod_base = OTHER; note = adenosine-3'-phosphate
  misc_feature 1..19: note = RNA
  misc_feature 20..21: note = DNA
gctacagtacatgtaacaatt

SEQ ID NO: 2173 - DNA, 21 bp, synthetic construct
  source 1..21: mol_type = other DNA
  modified_base 1: mod_base = OTHER; note = adenosine-3'-phosphate
  modified_base 2: mod_base = OTHER; note = adenosine-3'-phosphate
  modified_base 3: mod_base = OTHER; note = cytidine-3'-phosphate
  modified_base 4: mod_base = OTHER; note = adenosine-3'-phosphate
  modified_base 5: mod_base = OTHER; note = adenosine-3'-phosphate
  modified_base 6: mod_base = OTHER; note = cytidine-3'-phosphate
  modified_base 7: mod_base = OTHER; note = uridine-3'-phosphate
  modified_base 8: mod_base = OTHER; note = guanosine-3'-phosphate
  modified_base 9: mod_base = OTHER; note = uridine-3'-phosphate
  modified_base 10: mod_base = OTHER; note = adenosine-3'-phosphate
  modified_base 11: mod_base = OTHER; note = guanosine-3'-phosphate
  modified_base 12: mod_base = OTHER; note = uridine-3'-phosphate
  modified_base 13: mod_base = OTHER; note = uridine-3'-phosphate
  modified_base 14: mod_base = OTHER; note = cytidine-3'-phosphate
  modified_base 15: mod_base = OTHER; note = adenosine-3'-phosphate
  modified_base 16: mod_base = OTHER; note = cytidine-3'-phosphate
  modified_base 17: mod_base = OTHER; note = adenosine-3'-phosphate
  modified_base 18: mod_base = OTHER; note = adenosine-3'-phosphate
  modified_base 19: mod_base = OTHER; note = adenosine-3'-phosphate
  misc_feature 1..19: note = RNA
  misc_feature 20..21: note = DNA
aacaactgtagttcacaaatt

SEQ ID NO: 2174 - DNA, 21 bp, synthetic construct
  source 1..21: mol_type = other DNA
  modified_base 1: mod_base = OTHER; note = guanosine-3'-phosphate
  modified_base 2: mod_base = OTHER; note = uridine-3'-phosphate
  modified_base 3: mod_base = OTHER; note = adenosine-3'-phosphate
  modified_base 4: mod_base = OTHER; note = guanosine-3'-phosphate
  modified_base 5: mod_base = OTHER; note = uridine-3'-phosphate
  modified_base 6: mod_base = OTHER; note = uridine-3'-phosphate
  modified_base 7: mod_base = OTHER; note = cytidine-3'-phosphate
  modified_base 8: mod_base = OTHER; note = adenosine-3'-phosphate
  modified_base 9: mod_base = OTHER; note = cytidine-3'-phosphate
  modified_base 10: mod_base = OTHER; note = adenosine-3'-phosphate
  modified_base 11: mod_base = OTHER; note = adenosine-3'-phosphate
  modified_base 12: mod_base = OTHER; note = adenosine-3'-phosphate
  modified_base 13: mod_base = OTHER; note = adenosine-3'-phosphate
  modified_base 14: mod_base = OTHER; note = cytidine-3'-phosphate
  modified_base 15: mod_base = OTHER; note = cytidine-3'-phosphate
  modified_base 16: mod_base = OTHER; note = adenosine-3'-phosphate
  modified_base 17: mod_base = OTHER; note = guanosine-3'-phosphate
  modified_base 18: mod_base = OTHER; note = uridine-3'-phosphate
  modified_base 19: mod_base = OTHER; note = adenosine-3'-phosphate
  misc_feature 1..19: note = RNA
  misc_feature 20..21: note = DNA
gtagttcacaaaaccagtatt

SEQ ID NO: 2175 - DNA, 21 bp, synthetic construct
  source 1..21: mol_type = other DNA
  modified_base 1: mod_base = OTHER; note = adenosine-3'-phosphate
  modified_base 2: mod_base = OTHER; note = adenosine-3'-phosphate
  modified_base 3: mod_base = OTHER; note = adenosine-3'-phosphate
  modified_base 4: mod_base = OTHER; note = cytidine-3'-phosphate
  modified_base 5: mod_base = OTHER; note = cytidine-3'-phosphate
  modified_base 6: mod_base = OTHER; note = adenosine-3'-phosphate
  modified_base 7: mod_base = OTHER; note = guanosine-3'-phosphate
  modified_base 8: mod_base = OTHER; note = uridine-3'-phosphate
  modified_base 9: mod_base = OTHER; note = adenosine-3'-phosphate
  modified_base 10: mod_base = OTHER; note = cytidine-3'-phosphate
  modified_base 11: mod_base = OTHER; note = cytidine-3'-phosphate
  modified_base 12: mod_base = OTHER; note = uridine-3'-phosphate
  modified_base 13: mod_base = OTHER; note = cytidine-3'-phosphate
  modified_base 14: mod_base = OTHER; note = uridine-3'-phosphate
  modified_base 15: mod_base = OTHER; note = guanosine-3'-phosphate
  modified_base 16: mod_base = OTHER; note = adenosine-3'-phosphate
  modified_base 17: mod_base = OTHER; note = guanosine-3'-phosphate
  modified_base 18: mod_base = OTHER; note = guanosine-3'-phosphate
  modified_base 19: mod_base = OTHER; note = adenosine-3'-phosphate
  misc_feature 1..19: note = RNA
  misc_feature 20..21: note = DNA
aaaccagtacctctgaggatt

SEQ ID NO: 2176 - DNA, 21 bp, synthetic construct
  source 1..21: mol_type = other DNA
  modified_base 1: mod_base = OTHER; note = uridine-3'-phosphate
  modified_base 2: mod_base = OTHER; note = guanosine-3'-phosphate
  modified_base 3: mod_base = OTHER; note = adenosine-3'-phosphate
  modified_base 4: mod_base = OTHER; note = guanosine-3'-phosphate
  modified_base 5: mod_base = OTHER; note = guanosine-3'-phosphate
  modified_base 6: mod_base = OTHER; note = adenosine-3'-phosphate
  modified_base 7: mod_base = OTHER; note = adenosine-3'-phosphate
  modified_base 8: mod_base = OTHER; note = guanosine-3'-phosphate
  modified_base 9: mod_base = OTHER; note = uridine-3'-phosphate
  modified_base 10: mod_base = OTHER; note = uridine-3'-phosphate
  modified_base 11: mod_base = OTHER; note = uridine-3'-phosphate
  modified_base 12: mod_base = OTHER; note = guanosine-3'-phosphate
  modified_base 13: mod_base = OTHER; note = cytidine-3'-phosphate
  modified_base 14: mod_base = OTHER; note = adenosine-3'-phosphate
  modified_base 15: mod_base = OTHER; note = guanosine-3'-phosphate
  modified_base 16: mod_base = OTHER; note = cytidine-3'-phosphate
  modified_base 17: mod_base = OTHER; note = uridine-3'-phosphate
  modified_base 18: mod_base = OTHER; note = uridine-3'-phosphate
  modified_base 19: mod_base = OTHER; note = uridine-3'-phosphate
  misc_feature 1..19: note = RNA
  misc_feature 20..21: note = DNA
tgaggaagtttgcagcttttt

SEQ ID NO: 2177 - DNA, 21 bp, synthetic construct
  source 1..21: mol_type = other DNA
  modified_base 1: mod_base = OTHER; note = uridine-3'-phosphate
  modified_base 2: mod_base = OTHER; note = guanosine-3'-phosphate
  modified_base 3: mod_base = OTHER; note = cytidine-3'-phosphate
  modified_base 4: mod_base = OTHER; note = adenosine-3'-phosphate
  modified_base 5: mod_base = OTHER; note = guanosine-3'-phosphate
  modified_base 6: mod_base = OTHER; note = cytidine-3'-phosphate
  modified_base 7: mod_base = OTHER; note = uridine-3'-phosphate
  modified_base 8: mod_base = OTHER; note = uridine-3'-phosphate
  modified_base 9: mod_base = OTHER; note = uridine-3'-phosphate
  modified_base 10: mod_base = OTHER; note = uridine-3'-phosphate
  modified_base 11: mod_base = OTHER; note = adenosine-3'-phosphate
  modified_base 12: mod_base = OTHER; note = uridine-3'-phosphate
  modified_base 13: mod_base = OTHER; note = uridine-3'-phosphate
  modified_base 14: mod_base = OTHER; note = uridine-3'-phosphate
  modified_base 15: mod_base = OTHER; note = guanosine-3'-phosphate
  modified_base 16: mod_base = OTHER; note = adenosine-3'-phosphate
  modified_base 17: mod_base = OTHER; note = adenosine-3'-phosphate
  modified_base 18: mod_base = OTHER; note = adenosine-3'-phosphate
  modified_base 19: mod_base = OTHER; note = adenosine-3'-phosphate
  misc_feature 1..19: note = RNA
  misc_feature 20..21: note = DNA
tgcagcttttatttgaaaatt

SEQ ID NO: 2178 - DNA, 21 bp, synthetic construct
  source 1..21: mol_type = other DNA
  modified_base 1: mod_base = OTHER; note = adenosine-3'-phosphate
  modified_base 2: mod_base = OTHER; note = uridine-3'-phosphate
  modified_base 3: mod_base = OTHER; note = uridine-3'-phosphate
  modified_base 4: mod_base = OTHER; note = uridine-3'-phosphate
  modified_base 5: mod_base = OTHER; note = guanosine-3'-phosphate
  modified_base 6: mod_base = OTHER; note = adenosine-3'-phosphate
  modified_base 7: mod_base = OTHER; note = adenosine-3'-phosphate
  modified_base 8: mod_base = OTHER; note = adenosine-3'-phosphate
  modified_base 9: mod_base = OTHER; note = adenosine-3'-phosphate
  modified_base 10: mod_base = OTHER; note = uridine-3'-phosphate
  modified_base 11: mod_base = OTHER; note = cytidine-3'-phosphate
  modified_base 12: mod_base = OTHER; note = guanosine-3'-phosphate
  modified_base 13: mod_base = OTHER; note = adenosine-3'-phosphate
  modified_base 14: mod_base = OTHER; note = uridine-3'-phosphate
  modified_base 15: mod_base = OTHER; note = adenosine-3'-phosphate
  modified_base 16: mod_base = OTHER; note = cytidine-3'-phosphate
  modified_base 17: mod_base = OTHER; note = uridine-3'-phosphate
  modified_base 18: mod_base = OTHER; note = cytidine-3'-phosphate
  modified_base 19: mod_base = OTHER; note = adenosine-3'-phosphate
  misc_feature 1..19: note = RNA
  misc_feature 20..21: note = DNA
atttgaaaatcgatactcatt

SEQ ID NO: 2179 - DNA, 21 bp, synthetic construct
  source 1..21: mol_type = other DNA
  modified_base 1: mod_base = OTHER; note = cytidine-3'-phosphate
  modified_base 2: mod_base = OTHER; note = guanosine-3'-phosphate
  modified_base 3: mod_base = OTHER; note = adenosine-3'-phosphate
  modified_base 4: mod_base = OTHER; note = uridine-3'-phosphate
  modified_base 5: mod_base = OTHER; note = adenosine-3'-phosphate
  modified_base 6: mod_base = OTHER; note = cytidine-3'-phosphate
  modified_base 7: mod_base = OTHER; note = uridine-3'-phosphate
  modified_base 8: mod_base = OTHER; note = cytidine-3'-phosphate
  modified_base 9: mod_base = OTHER; note = adenosine-3'-phosphate
  modified_base 10: mod_base = OTHER; note = guanosine-3'-phosphate
  modified_base 11: mod_base = OTHER; note = guanosine-3'-phosphate
  modified_base 12: mod_base = OTHER; note = adenosine-3'-phosphate
  modified_base 13: mod_base = OTHER; note = uridine-3'-phosphate
  modified_base 14: mod_base = OTHER; note = adenosine-3'-phosphate
  modified_base 15: mod_base = OTHER; note = uridine-3'-phosphate
  modified_base 16: mod_base = OTHER; note = uridine-3'-phosphate
  modified_base 17: mod_base = OTHER; note = guanosine-3'-phosphate
  modified_base 18: mod_base = OTHER; note = adenosine-3'-phosphate
  modified_base 19: mod_base = OTHER; note = adenosine-3'-phosphate
  misc_feature 1..19: note = RNA
  misc_feature 20..21: note = DNA
cgatactcaggatattgaatt

SEQ ID NO: 2180 - DNA, 21 bp, synthetic construct
  source 1..21: mol_type = other DNA
  modified_base 1: mod_base = OTHER; note = guanosine-3'-phosphate
  modified_base 2: mod_base = OTHER; note = guanosine-3'-phosphate
  modified_base 3: mod_base = OTHER; note = adenosine-3'-phosphate
  modified_base 4: mod_base = OTHER; note = uridine-3'-phosphate
  modified_base 5: mod_base = OTHER; note = adenosine-3'-phosphate
  modified_base 6: mod_base = OTHER; note = uridine-3'-phosphate
  modified_base 7: mod_base = OTHER; note = uridine-3'-phosphate
  modified_base 8: mod_base = OTHER; note = guanosine-3'-phosphate
  modified_base 9: mod_base = OTHER; note = adenosine-3'-phosphate
  modified_base 10: mod_base = OTHER; note = adenosine-3'-phosphate
  modified_base 11: mod_base = OTHER; note = guanosine-3'-phosphate
  modified_base 12: mod_base = OTHER; note = cytidine-3'-phosphate
  modified_base 13: mod_base = OTHER; note = adenosine-3'-phosphate
  modified_base 14: mod_base = OTHER; note = uridine-3'-phosphate
  modified_base 15: mod_base = OTHER; note = cytidine-3'-phosphate
  modified_base 16: mod_base = OTHER; note = cytidine-3'-phosphate
  modified_base 17: mod_base = OTHER; note = cytidine-3'-phosphate
  modified_base 18: mod_base = OTHER; note = adenosine-3'-phosphate
  modified_base 19: mod_base = OTHER; note = cytidine-3'-phosphate
  misc_feature 1..19: note = RNA
  misc_feature 20..21: note = DNA
ggatattgaagcatcccactt

SEQ ID NO: 2181 - DNA, 21 bp, synthetic construct
  source 1..21: mol_type = other DNA
  modified_base 1: mod_base = OTHER; note = guanosine-3'-phosphate
  modified_base 2: mod_base = OTHER; note = adenosine-3'-phosphate
  modified_base 3: mod_base = OTHER; note = adenosine-3'-phosphate
  modified_base 4: mod_base = OTHER; note = guanosine-3'-phosphate
  modified_base 5: mod_base = OTHER; note = cytidine-3'-phosphate
  modified_base 6: mod_base = OTHER; note = adenosine-3'-phosphate
  modified_base 7: mod_base = OTHER; note = uridine-3'-phosphate
  modified_base 8: mod_base = OTHER; note = cytidine-3'-phosphate
  modified_base 9: mod_base = OTHER; note = cytidine-3'-phosphate
  modified_base 10: mod_base = OTHER; note = cytidine-3'-phosphate
  modified_base 11: mod_base = OTHER; note = adenosine-3'-phosphate
  modified_base 12: mod_base = OTHER; note = cytidine-3'-phosphate
  modified_base 13: mod_base = OTHER; note = uridine-3'-phosphate
  modified_base 14: mod_base = OTHER; note = adenosine-3'-phosphate
  modified_base 15: mod_base = OTHER; note = cytidine-3'-phosphate
  modified_base 16: mod_base = OTHER; note = adenosine-3'-phosphate
  modified_base 17: mod_base = OTHER; note = guanosine-3'-phosphate
  modified_base 18: mod_base = OTHER; note = adenosine-3'-phosphate
  modified_base 19: mod_base = OTHER; note = guanosine-3'-phosphate
  misc_feature 1..19: note = RNA
  misc_feature 20..21: note = DNA
gaagcatcccactacagagtt

SEQ ID NO: 2182 - DNA, 21 bp, synthetic construct
  source 1..21: mol_type = other DNA
  modified_base 1: mod_base = OTHER; note = adenosine-3'-phosphate
  modified_base 2: mod_base = OTHER; note = cytidine-3'-phosphate
  modified_base 3: mod_base = OTHER; note = uridine-3'-phosphate
  modified_base 4: mod_base = OTHER; note = adenosine-3'-phosphate
  modified_base 5: mod_base = OTHER; note = cytidine-3'-phosphate
  modified_base 6: mod_base = OTHER; note = adenosine-3'-phosphate
  modified_base 7: mod_base = OTHER; note = guanosine-3'-phosphate
  modified_base 8: mod_base = OTHER; note = adenosine-3'-phosphate
  modified_base 9: mod_base = OTHER; note = guanosine-3'-phosphate
  modified_base 10: mod_base = OTHER; note = guanosine-3'-phosphate
  modified_base 11: mod_base = OTHER; note = cytidine-3'-phosphate
  modified_base 12: mod_base = OTHER; note = uridine-3'-phosphate
  modified_base 13: mod_base = OTHER; note = adenosine-3'-phosphate
  modified_base 14: mod_base = OTHER; note = cytidine-3'-phosphate
  modified_base 15: mod_base = OTHER; note = guanosine-3'-phosphate
  modified_base 16: mod_base = OTHER; note = guanosine-3'-phosphate
  modified_base 17: mod_base = OTHER; note = adenosine-3'-phosphate
  modified_base 18: mod_base = OTHER; note = adenosine-3'-phosphate
  modified_base 19: mod_base = OTHER; note = adenosine-3'-phosphate
  misc_feature 1..19: note = RNA
  misc_feature 20..21: note = DNA
actacagaggctacggaaatt

SEQ ID NO: 2183 - DNA, 21 bp, synthetic construct
  source 1..21: mol_type = other DNA
  modified_base 1: mod_base = OTHER; note = cytidine-3'-phosphate
  modified_base 2: mod_base = OTHER; note = guanosine-3'-phosphate
  modified_base 3: mod_base = OTHER; note = guanosine-3'-phosphate
  modified_base 4: mod_base = OTHER; note = adenosine-3'-phosphate
  modified_base 5: mod_base = OTHER; note = adenosine-3'-phosphate
  modified_base 6: mod_base = OTHER; note = adenosine-3'-phosphate
  modified_base 7: mod_base = OTHER; note = cytidine-3'-phosphate
  modified_base 8: mod_base = OTHER; note = uridine-3'-phosphate
  modified_base 9: mod_base = OTHER; note = cytidine-3'-phosphate
  modified_base 10: mod_base = OTHER; note = uridine-3'-phosphate
  modified_base 11: mod_base = OTHER; note = guanosine-3'-phosphate
  modified_base 12: mod_base = OTHER; note = adenosine-3'-phosphate
  modified_base 13: mod_base = OTHER; note = uridine-3'-phosphate
  modified_base 14: mod_base = OTHER; note = uridine-3'-phosphate
  modified_base 15: mod_base = OTHER; note = adenosine-3'-phosphate
  modified_base 16: mod_base = OTHER; note = cytidine-3'-phosphate
  modified_base 17: mod_base = OTHER; note = adenosine-3'-phosphate
  modified_base 18: mod_base = OTHER; note = adenosine-3'-phosphate
  modified_base 19: mod_base = OTHER; note = adenosine-3'-phosphate
  misc_feature 1..19: note = RNA
  misc_feature 20..21: note = DNA
cggaaactctgattacaaatt

SEQ ID NO: 2184 - DNA, 21 bp, synthetic construct
  source 1..21: mol_type = other DNA
  modified_base 1: mod_base = OTHER; note = uridine-3'-phosphate
  modified_base 2: mod_base = OTHER; note = guanosine-3'-phosphate
  modified_base 3: mod_base = OTHER; note = adenosine-3'-phosphate
  modified_base 4: mod_base = OTHER; note = uridine-3'-phosphate
  modified_base 5: mod_base = OTHER; note = uridine-3'-phosphate
  modified_base 6: mod_base = OTHER; note = adenosine-3'-phosphate
  modified_base 7: mod_base = OTHER; note = cytidine-3'-phosphate
  modified_base 8: mod_base = OTHER; note = adenosine-3'-phosphate
  modified_base 9: mod_base = OTHER; note = adenosine-3'-phosphate
  modified_base 10: mod_base = OTHER; note = adenosine-3'-phosphate
  modified_base 11: mod_base = OTHER; note = cytidine-3'-phosphate
  modified_base 12: mod_base = OTHER; note = guanosine-3'-phosphate
  modified_base 13: mod_base = OTHER; note = cytidine-3'-phosphate
  modified_base 14: mod_base = OTHER; note = adenosine-3'-phosphate
  modified_base 15: mod_base = OTHER; note = uridine-3'-phosphate
  modified_base 16: mod_base = OTHER; note = adenosine-3'-phosphate
  modified_base 17: mod_base = OTHER; note = guanosine-3'-phosphate
  modified_base 18: mod_base = OTHER; note = uridine-3'-phosphate
  modified_base 19: mod_base = OTHER; note = adenosine-3'-phosphate
  misc_feature 1..19: note = RNA
  misc_feature 20..21: note = DNA
tgattacaaacgcatagtatt

SEQ ID NO: 2185 - DNA, 21 bp, synthetic construct
  source 1..21: mol_type = other DNA
  modified_base 1: mod_base = OTHER; note = guanosine-3'-phosphate
  modified_base 2: mod_base = OTHER; note = cytidine-3'-phosphate
  modified_base 3: mod_base = OTHER; note = adenosine-3'-phosphate
  modified_base 4: mod_base = OTHER; note = uridine-3'-phosphate
  modified_base 5: mod_base = OTHER; note = adenosine-3'-phosphate
  modified_base 6: mod_base = OTHER; note = guanosine-3'-phosphate
  modified_base 7: mod_base = OTHER; note = uridine-3'-phosphate
  modified_base 8: mod_base = OTHER; note = adenosine-3'-phosphate
  modified_base 9: mod_base = OTHER; note = guanosine-3'-phosphate
  modified_base 10: mod_base = OTHER; note = cytidine-3'-phosphate
  modified_base 11: mod_base = OTHER; note = adenosine-3'-phosphate
  modified_base 12: mod_base = OTHER; note = uridine-3'-phosphate
  modified_base 13: mod_base = OTHER; note = guanosine-3'-phosphate
  modified_base 14: mod_base = OTHER; note = uridine-3'-phosphate
  modified_base 15: mod_base = OTHER; note = guanosine-3'-phosphate
  modified_base 16: mod_base = OTHER; note = cytidine-3'-phosphate
  modified_base 17: mod_base = OTHER; note = cytidine-3'-phosphate
  modified_base 18: mod_base = OTHER; note = adenosine-3'-phosphate
  modified_base 19: mod_base = OTHER; note = guanosine-3'-phosphate
  misc_feature 1..19: note = RNA
  misc_feature 20..21: note = DNA
gcatagtagcatgtgccagtt

SEQ ID NO: 2186 - DNA, 21 bp, synthetic construct
  source 1..21: mol_type = other DNA
  modified_base 1: mod_base = OTHER; note = guanosine-3'-phosphate
  modified_base 2: mod_base = OTHER; note = cytidine-3'-phosphate
  modified_base 3: mod_base = OTHER; note = adenosine-3'-phosphate
  modified_base 4: mod_base = OTHER; note = uridine-3'-phosphate
  modified_base 5: mod_base = OTHER; note = guanosine-3'-phosphate
  modified_base 6: mod_base = OTHER; note = uridine-3'-phosphate
  modified_base 7: mod_base = OTHER; note = guanosine-3'-phosphate
  modified_base 8: mod_base = OTHER; note = cytidine-3'-phosphate
  modified_base 9: mod_base = OTHER; note = cytidine-3'-phosphate
  modified_base 10: mod_base = OTHER; note = adenosine-3'-phosphate
  modified_base 11: mod_base = OTHER; note = guanosine-3'-phosphate
  modified_base 12: mod_base = OTHER; note = cytidine-3'-phosphate
  modified_base 13: mod_base = OTHER; note = uridine-3'-phosphate
  modified_base 14: mod_base = OTHER; note = adenosine-3'-phosphate
  modified_base 15: mod_base = OTHER; note = cytidine-3'-phosphate
  modified_base 16: mod_base = OTHER; note = adenosine-3'-phosphate
  modified_base 17: mod_base = OTHER; note = adenosine-3'-phosphate
  modified_base 18: mod_base = OTHER; note = guanosine-3'-phosphate
  modified_base 19: mod_base = OTHER; note = cytidine-3'-phosphate
  misc_feature 1..19: note = RNA
  misc_feature 20..21: note = DNA
gcatgtgccagctacaagctt

SEQ ID NO: 2187 - DNA, 21 bp, synthetic construct
  source 1..21: mol_type = other DNA
  modified_base 1: mod_base = OTHER; note = cytidine-3'-phosphate
  modified_base 2: mod_base = OTHER; note = uridine-3'-phosphate
  modified_base 3: mod_base = OTHER; note = adenosine-3'-phosphate
  modified_base 4: mod_base = OTHER; note = cytidine-3'-phosphate
  modified_base 5: mod_base = OTHER; note = adenosine-3'-phosphate
  modified_base 6: mod_base = OTHER; note = adenosine-3'-phosphate
  modified_base 7: mod_base = OTHER; note = guanosine-3'-phosphate
  modified_base 8: mod_base = OTHER; note = cytidine-3'-phosphate
  modified_base 9: mod_base = OTHER; note = cytidine-3'-phosphate
  modified_base 10: mod_base = OTHER; note = cytidine-3'-phosphate
  modified_base 11: mod_base = OTHER; note = adenosine-3'-phosphate
  modified_base 12: mod_base = OTHER; note = guanosine-3'-phosphate
  modified_base 13: mod_base = OTHER; note = cytidine-3'-phosphate
  modified_base 14: mod_base = OTHER; note = adenosine-3'-phosphate
  modified_base 15: mod_base = OTHER; note = guanosine-3'-phosphate
  modified_base 16: mod_base = OTHER; note = guanosine-3'-phosphate
  modified_base 17: mod_base = OTHER; note = guanosine-3'-phosphate
  modified_base 18: mod_base = OTHER; note = adenosine-3'-phosphate
  modified_base 19: mod_base = OTHER; note = adenosine-3'-phosphate
  misc_feature 1..19: note = RNA
  misc_feature 20..21: note = DNA
ctacaagcccagcagggaatt

SEQ ID NO: 2188 - DNA, 21 bp, synthetic construct
  source 1..21: mol_type = other DNA
  modified_base 1: mod_base = OTHER; note = cytidine-3'-phosphate
  modified_base 2: mod_base = OTHER; note = adenosine-3'-phosphate
  modified_base 3: mod_base = OTHER; note = guanosine-3'-phosphate
  modified_base 4: mod_base = OTHER; note = cytidine-3'-phosphate
  modified_base 5: mod_base = OTHER; note = adenosine-3'-phosphate
  modified_base 6: mod_base = OTHER; note = guanosine-3'-phosphate
  modified_base 7: mod_base = OTHER; note = guanosine-3'-phosphate
  modified_base 8: mod_base = OTHER; note = guanosine-3'-phosphate
  modified_base 9: mod_base = OTHER; note = adenosine-3'-phosphate
  modified_base 10: mod_base = OTHER; note = adenosine-3'-phosphate
  modified_base 11: mod_base = OTHER; note = guanosine-3'-phosphate
  modified_base 12: mod_base = OTHER; note = adenosine-3'-phosphate
  modified_base 13: mod_base = OTHER; note = adenosine-3'-phosphate
  modified_base 14: mod_base = OTHER; note = uridine-3'-phosphate
  modified_base 15: mod_base = OTHER; note = cytidine-3'-phosphate
  modified_base 16: mod_base = OTHER; note = adenosine-3'-phosphate
  modified_base 17: mod_base = OTHER; note = uridine-3'-phosphate
  modified_base 18: mod_base = OTHER; note = cytidine-3'-phosphate
  modified_base 19: mod_base = OTHER; note = adenosine-3'-phosphate
  misc_feature 1..19: note = RNA
  misc_feature 20..21: note = DNA
cagcagggaagaatcatcatt

SEQ ID NO: 2189 - DNA, 21 bp, synthetic construct
  source 1..21: mol_type = other DNA
  modified_base 1: mod_base = OTHER; note = guanosine-3'-phosphate
  modified_base 2: mod_base = OTHER; note = adenosine-3'-phosphate
  modified_base 3: mod_base = OTHER; note = adenosine-3'-phosphate
  modified_base 4: mod_base = OTHER; note = uridine-3'-phosphate
  modified_base 5: mod_base = OTHER; note = cytidine-3'-phosphate
  modified_base 6: mod_base = OTHER; note = adenosine-3'-phosphate
  modified_base 7: mod_base = OTHER; note = uridine-3'-phosphate
  modified_base 8: mod_base = OTHER; note = cytidine-3'-phosphate
  modified_base 9: mod_base = OTHER; note = adenosine-3'-phosphate
  modified_base 10: mod_base = OTHER; note = uridine-3'-phosphate
  modified_base 11: mod_base = OTHER; note = cytidine-3'-phosphate
  modified_base 12: mod_base = OTHER; note = uridine-3'-phosphate
  modified_base 13: mod_base = OTHER; note = guanosine-3'-phosphate
  modified_base 14: mod_base = OTHER; note = guanosine-3'-phosphate
  modified_base 15: mod_base = OTHER; note = adenosine-3'-phosphate
  modified_base 16: mod_base = OTHER; note = uridine-3'-phosphate
  modified_base 17: mod_base = OTHER; note = cytidine-3'-phosphate
  modified_base 18: mod_base = OTHER; note = cytidine-3'-phosphate
  modified_base 19: mod_base = OTHER; note = uridine-3'-phosphate
  misc_feature 1..19: note = RNA
  misc_feature 20..21: note = DNA
gaatcatcatctggatccttt

SEQ ID NO: 2190 - DNA, 21 bp, synthetic construct
  source 1..21: mol_type = other DNA
  modified_base 1: mod_base = OTHER; note = guanosine-3'-phosphate
  modified_base 2: mod_base = OTHER; note = adenosine-3'-phosphate
  modified_base 3: mod_base = OTHER; note = uridine-3'-phosphate
  modified_base 4: mod_base = OTHER; note = cytidine-3'-phosphate
  modified_base 5: mod_base = OTHER; note = cytidine-3'-phosphate
  modified_base 6: mod_base = OTHER; note = uridine-3'-phosphate
  modified_base 7: mod_base = OTHER; note = cytidine-3'-phosphate
  modified_base 8: mod_base = OTHER; note = uridine-3'-phosphate
  modified_base 9: mod_base = OTHER; note = cytidine-3'-phosphate
  modified_base 10: mod_base = OTHER; note = adenosine-3'-phosphate
  modified_base 11: mod_base = OTHER; note = uridine-3'-phosphate
  modified_base 12: mod_base = OTHER; note = guanosine-3'-phosphate
  modified_base 13: mod_base = OTHER; note = cytidine-3'-phosphate
  modified_base 14: mod_base = OTHER; note = guanosine-3'-phosphate
  modified_base 15: mod_base = OTHER; note = guanosine-3'-phosphate
  modified_base 16: mod_base = OTHER; note = uridine-3'-phosphate
  modified_base 17: mod_base = OTHER; note = guanosine-3'-phosphate
  modified_base 18: mod_base = OTHER; note = adenosine-3'-phosphate
  modified_base 19: mod_base = OTHER; note = uridine-3'-phosphate
  misc_feature 1..19: note = RNA
  misc_feature 20..21: note = DNA
gatcctctcatgcggtgattt

SEQ ID NO: 2191 - DNA, 21 bp, synthetic construct
  source 1..21: mol_type = other DNA
  modified_base 1: mod_base = OTHER; note = cytidine-3'-phosphate
  modified_base 2: mod_base = OTHER; note = uridine-3'-phosphate
  modified_base 3: mod_base = OTHER; note = cytidine-3'-phosphate
  modified_base 4: mod_base = OTHER; note = adenosine-3'-phosphate
  modified_base 5: mod_base = OTHER; note = uridine-3'-phosphate
  modified_base 6: mod_base = OTHER; note = guanosine-3'-phosphate
  modified_base 7: mod_base = OTHER; note = cytidine-3'-phosphate
  modified_base 8: mod_base = OTHER; note = guanosine-3'-phosphate
  modified_base 9: mod_base = OTHER; note = guanosine-3'-phosphate
  modified_base 10: mod_base = OTHER; note = uridine-3'-phosphate
  modified_base 11: mod_base = OTHER; note = guanosine-3'-phosphate
  modified_base 12: mod_base = OTHER; note = adenosine-3'-phosphate
  modified_base 13: mod_base = OTHER; note = uridine-3'-phosphate
  modified_base 14: mod_base = OTHER; note = guanosine-3'-phosphate
  modified_base 15: mod_base = OTHER; note = guanosine-3'-phosphate
  modified_base 16: mod_base = OTHER; note = adenosine-3'-phosphate
  modified_base 17: mod_base = OTHER; note = cytidine-3'-phosphate
  modified_base 18: mod_base = OTHER; note = adenosine-3'-phosphate
  modified_base 19: mod_base = OTHER; note = uridine-3'-phosphate
  misc_feature 1..19: note = RNA
  misc_feature 20..21: note = DNA
ctcatgcggtgatggacattt

SEQ ID NO: 2192 - DNA, 21 bp, synthetic construct
  source 1..21: mol_type = other DNA
  modified_base 1: mod_base = OTHER; note = guanosine-3'-phosphate
  modified_base 2: mod_base = OTHER; note = adenosine-3'-phosphate
  modified_base 3: mod_base = OTHER; note = uridine-3'-phosphate
  modified_base 4: mod_base = OTHER; note = guanosine-3'-phosphate
  modified_base 5: mod_base = OTHER; note = guanosine-3'-phosphate
  modified_base 6: mod_base = OTHER; note = adenosine-3'-phosphate
  modified_base 7: mod_base = OTHER; note = cytidine-3'-phosphate
  modified_base 8: mod_base = OTHER; note = adenosine-3'-phosphate
  modified_base 9: mod_base = OTHER; note = uridine-3'-phosphate
  modified_base 10: mod_base = OTHER; note = cytidine-3'-phosphate
  modified_base 11: mod_base = OTHER; note = uridine-3'-phosphate
  modified_base 12: mod_base = OTHER; note = cytidine-3'-phosphate
  modified_base 13: mod_base = OTHER; note = cytidine-3'-phosphate
  modified_base 14: mod_base = OTHER; note = uridine-3'-phosphate
  modified_base 15: mod_base = OTHER; note = uridine-3'-phosphate
  modified_base 16: mod_base = OTHER; note = guanosine-3'-phosphate
  modified_base 17: mod_base = OTHER; note = cytidine-3'-phosphate
  modified_base 18: mod_base = OTHER; note = cytidine-3'-phosphate
  modified_base 19: mod_base = OTHER; note = uridine-3'-phosphate
  misc_feature 1..19: note = RNA
  misc_feature 20..21: note = DNA
gatggacatctccttgccttt

SEQ ID NO: 2193 - DNA, 21 bp, synthetic construct
  source 1..21: mol_type = other DNA
  modified_base 1: mod_base = OTHER; note = cytidine-3'-phosphate
  modified_base 2: mod_base = OTHER; note = uridine-3'-phosphate
  modified_base 3: mod_base = OTHER; note = uridine-3'-phosphate
  modified_base 4: mod_base = OTHER; note = guanosine-3'-phosphate
  modified_base 5: mod_base = OTHER; note = cytidine-3'-phosphate
  modified_base 6: mod_base = OTHER; note = cytidine-3'-phosphate
  modified_base 7: mod_base = OTHER; note = uridine-3'-phosphate
  modified_base 8: mod_base = OTHER; note = adenosine-3'-phosphate
  modified_base 9: mod_base = OTHER; note = cytidine-3'-phosphate
  modified_base 10: mod_base = OTHER; note = uridine-3'-phosphate
  modified_base 11: mod_base = OTHER; note = guanosine-3'-phosphate
  modified_base 12: mod_base = OTHER; note = guanosine-3'-phosphate
  modified_base 13: mod_base = OTHER; note = adenosine-3'-phosphate
  modified_base 14: mod_base = OTHER; note = adenosine-3'-phosphate
  modified_base 15: mod_base = OTHER; note = uridine-3'-phosphate
  modified_base 16: mod_base = OTHER; note = cytidine-3'-phosphate
  modified_base 17: mod_base = OTHER; note = adenosine-3'-phosphate
  modified_base 18: mod_base = OTHER; note = guanosine-3'-phosphate
  modified_base 19: mod_base = OTHER; note = uridine-3'-phosphate
  misc_feature 1..19: note = RNA
  misc_feature 20..21: note = DNA
cttgcctactggaatcagttt

SEQ ID NO: 2194 - DNA, 21 bp, synthetic construct
  source 1..21: mol_type = other DNA
  modified_base 1: mod_base = OTHER; note = guanosine-3'-phosphate
  modified_base 2: mod_base = OTHER; note = adenosine-3'-phosphate
  modified_base 3: mod_base = OTHER; note = adenosine-3'-phosphate
  modified_base 4: mod_base = OTHER; note = uridine-3'-phosphate
  modified_base 5: mod_base = OTHER; note = cytidine-3'-phosphate
  modified_base 6: mod_base = OTHER; note = adenosine-3'-phosphate
  modified_base 7: mod_base = OTHER; note = guanosine-3'-phosphate
  modified_base 8: mod_base = OTHER; note = uridine-3'-phosphate
  modified_base 9: mod_base = OTHER; note = guanosine-3'-phosphate
  modified_base 10: mod_base = OTHER; note = cytidine-3'-phosphate
  modified_base 11: mod_base = OTHER; note = adenosine-3'-phosphate
  modified_base 12: mod_base = OTHER; note = adenosine-3'-phosphate
  modified_base 13: mod_base = OTHER; note = adenosine-3'-phosphate
  modified_base 14: mod_base = OTHER; note = uridine-3'-phosphate
  modified_base 15: mod_base = OTHER; note = guanosine-3'-phosphate
  modified_base 16: mod_base = OTHER; note = adenosine-3'-phosphate
  modified_base 17: mod_base = OTHER; note = adenosine-3'-phosphate
  modified_base 18: mod_base = OTHER; note = guanosine-3'-phosphate
  modified_base 19: mod_base = OTHER; note = adenosine-3'-phosphate
  misc_feature 1..19: note = RNA
  misc_feature 20..21: note = DNA
gaatcagtgcaaatgaagatt

SEQ ID NO: 2195 - DNA, 21 bp, synthetic construct
  source 1..21: mol_type = other DNA
  modified_base 1: mod_base = OTHER; note = adenosine-3'-phosphate
  modified_base 2: mod_base = OTHER; note = adenosine-3'-phosphate
  modified_base 3: mod_base = OTHER; note = adenosine-3'-phosphate
  modified_base 4: mod_base = OTHER; note = uridine-3'-phosphate
  modified_base 5: mod_base = OTHER; note = guanosine-3'-phosphate
  modified_base 6: mod_base = OTHER; note = adenosine-3'-phosphate
  modified_base 7: mod_base = OTHER; note = adenosine-3'-phosphate
  modified_base 8: mod_base = OTHER; note = guanosine-3'-phosphate
  modified_base 9: mod_base = OTHER; note = adenosine-3'-phosphate
  modified_base 10: mod_base = OTHER; note = adenosine-3'-phosphate
  modified_base 11: mod_base = OTHER; note = guanosine-3'-phosphate
  modified_base 12: mod_base = OTHER; note = adenosine-3'-phosphate
  modified_base 13: mod_base = OTHER; note = cytidine-3'-phosphate
  modified_base 14: mod_base = OTHER; note = uridine-3'-phosphate
  modified_base 15: mod_base = OTHER; note = uridine-3'-phosphate
  modified_base 16: mod_base = OTHER; note = adenosine-3'-phosphate
  modified_base 17: mod_base = OTHER; note = adenosine-3'-phosphate
  modified_base 18: mod_base = OTHER; note = adenosine-3'-phosphate
  modified_base 19: mod_base = OTHER; note = adenosine-3'-phosphate
  misc_feature 1..19: note = RNA
  misc_feature 20..21: note = DNA
aaatgaagaagacttaaaatt

SEQ ID NO: 2196 - DNA, 21 bp, synthetic construct
  source 1..21: mol_type = other DNA
  modified_base 1: mod_base = OTHER; note = guanosine-3'-phosphate
  modified_base 2: mod_base = OTHER; note = adenosine-3'-phosphate
  modified_base 3: mod_base = OTHER; note = adenosine-3'-phosphate
  modified_base 4: mod_base = OTHER; note = guanosine-3'-phosphate
  modified_base 5: mod_base = OTHER; note = adenosine-3'-phosphate
  modified_base 6: mod_base = OTHER; note = cytidine-3'-phosphate
  modified_base 7: mod_base = OTHER; note = uridine-3'-phosphate
  modified_base 8: mod_base = OTHER; note = uridine-3'-phosphate
  modified_base 9: mod_base = OTHER; note = adenosine-3'-phosphate
  modified_base 10: mod_base = OTHER; note = adenosine-3'-phosphate
  modified_base 11: mod_base = OTHER; note = adenosine-3'-phosphate
  modified_base 12: mod_base = OTHER; note = adenosine-3'-phosphate
  modified_base 13: mod_base = OTHER; note = guanosine-3'-phosphate
  modified_base 14: mod_base = OTHER; note = cytidine-3'-phosphate
  modified_base 15: mod_base = OTHER; note = cytidine-3'-phosphate
  modified_base 16: mod_base = OTHER; note = cytidine-3'-phosphate
  modified_base 17: mod_base = OTHER; note = uridine-3'-phosphate
  modified_base 18: mod_base = OTHER; note = uridine-3'-phosphate
  modified_base 19: mod_base = OTHER; note = guanosine-3'-phosphate
  misc_feature 1..19: note = RNA
  misc_feature 20..21: note = DNA
gaagacttaaaagcccttgtt

SEQ ID NO: 2197 - DNA, 21 bp, synthetic construct
  source 1..21: mol_type = other DNA
  modified_base 1: mod_base = OTHER; note = cytidine-3'-phosphate
  modified_base 2: mod_base = OTHER; note = cytidine-3'-phosphate
  modified_base 3: mod_base = OTHER; note = uridine-3'-phosphate
  modified_base 4: mod_base = OTHER; note = uridine-3'-phosphate
  modified_base 5: mod_base = OTHER; note = guanosine-3'-phosphate
  modified_base 6: mod_base = OTHER; note = uridine-3'-phosphate
  modified_base 7: mod_base = OTHER; note = guanosine-3'-phosphate
  modified_base 8: mod_base = OTHER; note = guanosine-3'-phosphate
  modified_base 9: mod_base = OTHER; note = adenosine-3'-phosphate
  modified_base 10: mod_base = OTHER; note = adenosine-3'-phosphate
  modified_base 11: mod_base = OTHER; note = guanosine-3'-phosphate
  modified_base 12: mod_base = OTHER; note = guanosine-3'-phosphate
  modified_base 13: mod_base = OTHER; note = guanosine-3'-phosphate
  modified_base 14: mod_base = OTHER; note = guanosine-3'-phosphate
  modified_base 15: mod_base = OTHER; note = uridine-3'-phosphate
  modified_base 16: mod_base = OTHER; note = guanosine-3'-phosphate
  modified_base 17: mod_base = OTHER; note = guanosine-3'-phosphate
  modified_base 18: mod_base = OTHER; note = adenosine-3'-phosphate
  modified_base 19: mod_base = OTHER; note = uridine-3'-phosphate
  misc_feature 1..19: note = RNA
  misc_feature 20..21: note = DNA
ccttgtggaaggggtggattt

SEQ ID NO: 2198 - DNA, 21 bp, synthetic construct
  source 1..21: mol_type = other DNA
  modified_base 1: mod_base = OTHER; note = guanosine-3'-phosphate
  modified_base 2: mod_base = OTHER; note = adenosine-3'-phosphate
  modified_base 3: mod_base = OTHER; note = adenosine-3'-phosphate
  modified_base 4: mod_base = OTHER; note = guanosine-3'-phosphate
  modified_base 5: mod_base = OTHER; note = guanosine-3'-phosphate
  modified_base 6: mod_base = OTHER; note = guanosine-3'-phosphate
  modified_base 7: mod_base = OTHER; note = guanosine-3'-phosphate
  modified_base 8: mod_base = OTHER; note = uridine-3'-phosphate
  modified_base 9: mod_base = OTHER; note = guanosine-3'-phosphate
  modified_base 10: mod_base = OTHER; note = guanosine-3'-phosphate
  modified_base 11: mod_base = OTHER; note = adenosine-3'-phosphate
  modified_base 12: mod_base = OTHER; note = uridine-3'-phosphate
  modified_base 13: mod_base = OTHER; note = cytidine-3'-phosphate
  modified_base 14: mod_base = OTHER; note = adenosine-3'-phosphate
  modified_base 15: mod_base = OTHER; note = adenosine-3'-phosphate
  modified_base 16: mod_base = OTHER; note = cytidine-3'-phosphate
  modified_base 17: mod_base = OTHER; note = uridine-3'-phosphate
  modified_base 18: mod_base = OTHER; note = adenosine-3'-phosphate
  modified_base 19: mod_base = OTHER; note = uridine-3'-phosphate
  misc_feature 1..19: note = RNA
  misc_feature 20..21: note = DNA
gaaggggtggatcaactattt

SEQ ID NO: 2199 - DNA, 21 bp, synthetic construct
  source 1..21: mol_type = other DNA
  modified_base 1: mod_base = OTHER; note = adenosine-3'-phosphate
  modified_base 2: mod_base = OTHER; note = uridine-3'-phosphate
  modified_base 3: mod_base = OTHER; note = cytidine-3'-phosphate
  modified_base 4: mod_base = OTHER; note = adenosine-3'-phosphate
  modified_base 5: mod_base = OTHER; note = adenosine-3'-phosphate
  modified_base 6: mod_base = OTHER; note = cytidine-3'-phosphate
  modified_base 7: mod_base = OTHER; note = uridine-3'-phosphate
  modified_base 8: mod_base = OTHER; note = adenosine-3'-phosphate
  modified_base 9: mod_base = OTHER; note = uridine-3'-phosphate
  modified_base 10: mod_base = OTHER; note = uridine-3'-phosphate
  modified_base 11: mod_base = OTHER; note = cytidine-3'-phosphate
  modified_base 12: mod_base = OTHER; note = adenosine-3'-phosphate
  modified_base 13: mod_base = OTHER; note = cytidine-3'-phosphate
  modified_base 14: mod_base = OTHER; note = uridine-3'-phosphate
  modified_base 15: mod_base = OTHER; note = guanosine-3'-phosphate
  modified_base 16: mod_base = OTHER; note = adenosine-3'-phosphate
  modified_base 17: mod_base = OTHER; note = uridine-3'-phosphate
  modified_base 18: mod_base = OTHER; note = uridine-3'-phosphate
  modified_base 19: mod_base = OTHER; note = adenosine-3'-phosphate
  misc_feature 1..19: note = RNA
  misc_feature 20..21: note = DNA
atcaactattcactgattatt

SEQ ID NO: 2200 - DNA, 21 bp, synthetic construct
  source 1..21: mol_type = other DNA
  modified_base 1: mod_base = OTHER; note = cytidine-3'-phosphate
  modified_base 2: mod_base = OTHER; note = adenosine-3'-phosphate
  modified_base 3: mod_base = OTHER; note = cytidine-3'-phosphate
  modified_base 4: mod_base = OTHER; note = uridine-3'-phosphate
  modified_base 5: mod_base = OTHER; note = guanosine-3'-phosphate
  modified_base 6: mod_base = OTHER; note = adenosine-3'-phosphate
  modified_base 7: mod_base = OTHER; note = uridine-3'-phosphate
  modified_base 8: mod_base = OTHER; note = uridine-3'-phosphate
  modified_base 9: mod_base = OTHER; note = adenosine-3'-phosphate
  modified_base 10: mod_base = OTHER; note = cytidine-3'-phosphate
  modified_base 11: mod_base = OTHER; note = cytidine-3'-phosphate
  modified_base 12: mod_base = OTHER; note = adenosine-3'-phosphate
  modified_base 13: mod_base = OTHER; note = adenosine-3'-phosphate
  modified_base 14: mod_base = OTHER; note = adenosine-3'-phosphate
  modified_base 15: mod_base = OTHER; note = uridine-3'-phosphate
  modified_base 16: mod_base = OTHER; note = cytidine-3'-phosphate
  modified_base 17: mod_base = OTHER; note = adenosine-3'-phosphate
  modified_base 18: mod_base = OTHER; note = adenosine-3'-phosphate
  modified_base 19: mod_base = OTHER; note = adenosine-3'-phosphate
  misc_feature 1..19: note = RNA
  misc_feature 20..21: note = DNA
cactgattaccaaatcaaatt

SEQ ID NO: 2201 - DNA, 21 bp, synthetic construct
  source 1..21: mol_type = other DNA
  modified_base 1: mod_base = OTHER; note = adenosine-3'-phosphate
  modified_base 2: mod_base = OTHER; note = uridine-3'-phosphate
  modified_base 3: mod_base = OTHER; note = cytidine-3'-phosphate
  modified_base 4: mod_base = OTHER; note = adenosine-3'-phosphate
  modified_base 5: mod_base = OTHER; note = adenosine-3'-phosphate
  modified_base 6: mod_base = OTHER; note = adenosine-3'-phosphate
  modified_base 7: mod_base = OTHER; note = guanosine-3'-phosphate
  modified_base 8: mod_base = OTHER; note = adenosine-3'-phosphate
  modified_base 9: mod_base = OTHER; note = uridine-3'-phosphate
  modified_base 10: mod_base = OTHER; note = guanosine-3'-phosphate
  modified_base 11: mod_base = OTHER; note = guanosine-3'-phosphate
  modified_base 12: mod_base = OTHER; note = adenosine-3'-phosphate
  modified_base 13: mod_base = OTHER; note = cytidine-3'-phosphate
  modified_base 14: mod_base = OTHER; note = adenosine-3'-phosphate
  modified_base 15: mod_base = OTHER; note = uridine-3'-phosphate
  modified_base 16: mod_base = OTHER; note = guanosine-3'-phosphate
  modified_base 17: mod_base = OTHER; note = uridine-3'-phosphate
  modified_base 18: mod_base = OTHER; note = uridine-3'-phosphate
  modified_base 19: mod_base = OTHER; note = adenosine-3'-phosphate
  misc_feature 1..19: note = RNA
  misc_feature 20..21: note = DNA
atcaaagatggacatgttatt

SEQ ID NO: 2202 - DNA, 21 bp, synthetic construct
  source 1..21: mol_type = other DNA
  modified_base 1: mod_base = OTHER; note = guanosine-3'-phosphate
  modified_base 2: mod_base = OTHER; note = guanosine-3'-phosphate
  modified_base 3: mod_base = OTHER; note = adenosine-3'-phosphate
  modified_base 4: mod_base = OTHER; note = cytidine-3'-phosphate
  modified_base 5: mod_base = OTHER; note = adenosine-3'-phosphate
  modified_base 6: mod_base = OTHER; note = uridine-3'-phosphate
  modified_base 7: mod_base = OTHER; note = guanosine-3'-phosphate
  modified_base 8: mod_base = OTHER; note = uridine-3'-phosphate
  modified_base 9: mod_base = OTHER; note = uridine-3'-phosphate
  modified_base 10: mod_base = OTHER; note = adenosine-3'-phosphate
  modified_base 11: mod_base = OTHER; note = uridine-3'-phosphate
  modified_base 12: mod_base = OTHER; note = uridine-3'-phosphate
  modified_base 13: mod_base = OTHER; note = cytidine-3'-phosphate
  modified_base 14: mod_base = OTHER; note = uridine-3'-phosphate
  modified_base 15: mod_base = OTHER; note = guanosine-3'-phosphate
  modified_base 16: mod_base = OTHER; note = cytidine-3'-phosphate
  modified_base 17: mod_base = OTHER; note = adenosine-3'-phosphate
  modified_base 18: mod_base = OTHER; note = adenosine-3'-phosphate
  modified_base 19: mod_base = OTHER; note = cytidine-3'-phosphate
  misc_feature 1..19: note = RNA
  misc_feature 20..21: note = DNA
ggacatgttattctgcaactt

SEQ ID NO: 2203 - DNA, 21 bp, synthetic construct
  source 1..21: mol_type = other DNA
  modified_base 1: mod_base = OTHER; note = uridine-3'-phosphate
  modified_base 2: mod_base = OTHER; note = cytidine-3'-phosphate
  modified_base 3: mod_base = OTHER; note = uridine-3'-phosphate
  modified_base 4: mod_base = OTHER; note = guanosine-3'-phosphate
  modified_base 5: mod_base = OTHER; note = cytidine-3'-phosphate
  modified_base 6: mod_base = OTHER; note = adenosine-3'-phosphate
  modified_base 7: mod_base = OTHER; note = adenosine-3'-phosphate
  modified_base 8: mod_base = OTHER; note = cytidine-3'-phosphate
  modified_base 9: mod_base = OTHER; note = uridine-3'-phosphate
  modified_base 10: mod_base = OTHER; note = guanosine-3'-phosphate
  modified_base 11: mod_base = OTHER; note = adenosine-3'-phosphate
  modified_base 12: mod_base = OTHER; note = adenosine-3'-phosphate
  modified_base 13: mod_base = OTHER; note = uridine-3'-phosphate
  modified_base 14: mod_base = OTHER; note = uridine-3'-phosphate
  modified_base 15: mod_base = OTHER; note = cytidine-3'-phosphate
  modified_base 16: mod_base = OTHER; note = guanosine-3'-phosphate
  modified_base 17: mod_base = OTHER; note = adenosine-3'-phosphate
  modified_base 18: mod_base = OTHER; note = uridine-3'-phosphate
  modified_base 19: mod_base = OTHER; note = uridine-3'-phosphate
  misc_feature 1..19: note = RNA
  misc_feature 20..21: note = DNA
tctgcaactgaattcgatttt

SEQ ID NO: 2204 - DNA, 21 bp, synthetic construct
  source 1..21: mol_type = other DNA
  modified_base 1: mod_base = OTHER; note = guanosine-3'-phosphate
  modified_base 2: mod_base = OTHER; note = adenosine-3'-phosphate
  modified_base 3: mod_base = OTHER; note = adenosine-3'-phosphate
  modified_base 4: mod_base = OTHER; note = uridine-3'-phosphate
  modified_base 5: mod_base = OTHER; note = uridine-3'-phosphate
  modified_base 6: mod_base = OTHER; note = cytidine-3'-phosphate
  modified_base 7: mod_base = OTHER; note = guanosine-3'-phosphate
  modified_base 8: mod_base = OTHER; note = adenosine-3'-phosphate
  modified_base 9: mod_base = OTHER; note = uridine-3'-phosphate
  modified_base 10: mod_base = OTHER; note = uridine-3'-phosphate
  modified_base 11: mod_base = OTHER; note = cytidine-3'-phosphate
  modified_base 12: mod_base = OTHER; note = cytidine-3'-phosphate
  modified_base 13: mod_base = OTHER; note = cytidine-3'-phosphate
  modified_base 14: mod_base = OTHER; note = uridine-3'-phosphate
  modified_base 15: mod_base = OTHER; note = cytidine-3'-phosphate
  modified_base 16: mod_base = OTHER; note = cytidine-3'-phosphate
  modified_base 17: mod_base = OTHER; note = adenosine-3'-phosphate
  modified_base 18: mod_base = OTHER; note = guanosine-3'-phosphate
  modified_base 19: mod_base = OTHER; note = uridine-3'-phosphate
  misc_feature 1..19: note = RNA
  misc_feature 20..21: note = DNA
gaattcgattccctccagttt

SEQ ID NO: 2205 - DNA, 21 bp, synthetic construct
  source 1..21: mol_type = other DNA
  modified_base 1: mod_base = OTHER; note = cytidine-3'-phosphate
  modified_base 2: mod_base = OTHER; note = cytidine-3'-phosphate
  modified_base 3: mod_base = OTHER; note = cytidine-3'-phosphate
  modified_base 4: mod_base = OTHER; note = uridine-3'-phosphate
  modified_base 5: mod_base = OTHER; note = cytidine-3'-phosphate
  modified_base 6: mod_base = OTHER; note = cytidine-3'-phosphate
  modified_base 7: mod_base = OTHER; note = adenosine-3'-phosphate
  modified_base 8: mod_base = OTHER; note = guanosine-3'-phosphate
  modified_base 9: mod_base = OTHER; note = uridine-3'-phosphate
  modified_base 10: mod_base = OTHER; note = guanosine-3'-phosphate
  modified_base 11: mod_base = OTHER; note = adenosine-3'-phosphate
  modified_base 12: mod_base = OTHER; note = uridine-3'-phosphate
  modified_base 13: mod_base = OTHER; note = uridine-3'-phosphate
  modified_base 14: mod_base = OTHER; note = uridine-3'-phosphate
  modified_base 15: mod_base = OTHER; note = cytidine-3'-phosphate
  modified_base 16: mod_base = OTHER; note = cytidine-3'-phosphate
  modified_base 17: mod_base = OTHER; note = uridine-3'-phosphate
  modified_base 18: mod_base = OTHER; note = uridine-3'-phosphate
  modified_base 19: mod_base = OTHER; note = uridine-3'-phosphate
  misc_feature 1..19: note = RNA
  misc_feature 20..21: note = DNA
ccctccagtgatttccttttt

SEQ ID NO: 2206 - DNA, 21 bp, synthetic construct
  source 1..21: mol_type = other DNA
  modified_base 1: mod_base = OTHER; note = guanosine-3'-phosphate
  modified_base 2: mod_base = OTHER; note = adenosine-3'-phosphate
  modified_base 3: mod_base = OTHER; note = uridine-3'-phosphate
  modified_base 4: mod_base = OTHER; note = uridine-3'-phosphate
  modified_base 5: mod_base = OTHER; note = uridine-3'-phosphate
  modified_base 6: mod_base = OTHER; note = cytidine-3'-phosphate
  modified_base 7: mod_base = OTHER; note = cytidine-3'-phosphate
  modified_base 8: mod_base = OTHER; note = uridine-3'-phosphate
  modified_base 9: mod_base = OTHER; note = uridine-3'-phosphate
  modified_base 10: mod_base = OTHER; note = uridine-3'-phosphate
  modified_base 11: mod_base = OTHER; note = guanosine-3'-phosphate
  modified_base 12: mod_base = OTHER; note = uridine-3'-phosphate
  modified_base 13: mod_base = OTHER; note = guanosine-3'-phosphate
  modified_base 14: mod_base = OTHER; note = uridine-3'-phosphate
  modified_base 15: mod_base = OTHER; note = adenosine-3'-phosphate
  modified_base 16: mod_base = OTHER; note = cytidine-3'-phosphate
  modified_base 17: mod_base = OTHER; note = guanosine-3'-phosphate
  modified_base 18: mod_base = OTHER; note = adenosine-3'-phosphate
  modified_base 19: mod_base = OTHER; note = uridine-3'-phosphate
  misc_feature 1..19: note = RNA
  misc_feature 20..21: note = DNA
gatttcctttgtgtacgattt

SEQ ID NO: 2207 - DNA, 21 bp, synthetic construct
  source 1..21: mol_type = other DNA
  modified_base 1: mod_base = OTHER; note = guanosine-3'-phosphate
  modified_base 2: mod_base = OTHER; note = uridine-3'-phosphate
  modified_base 3: mod_base = OTHER; note = adenosine-3'-phosphate
  modified_base 4: mod_base = OTHER; note = cytidine-3'-phosphate
  modified_base 5: mod_base = OTHER; note = guanosine-3'-phosphate
  modified_base 6: mod_base = OTHER; note = adenosine-3'-phosphate
  modified_base 7: mod_base = OTHER; note = uridine-3'-phosphate
  modified_base 8: mod_base = OTHER; note = uridine-3'-phosphate
  modified_base 9: mod_base = OTHER; note = cytidine-3'-phosphate
  modified_base 10: mod_base = OTHER; note = cytidine-3'-phosphate
  modified_base 11: mod_base = OTHER; note = guanosine-3'-phosphate
  modified_base 12: mod_base = OTHER; note = guanosine-3'-phosphate
  modified_base 13: mod_base = OTHER; note = adenosine-3'-phosphate
  modified_base 14: mod_base = OTHER; note = uridine-3'-phosphate
  modified_base 15: mod_base = OTHER; note = adenosine-3'-phosphate
  modified_base 16: mod_base = OTHER; note = uridine-3'-phosphate
  modified_base 17: mod_base = OTHER; note = uridine-3'-phosphate
  modified_base 18: mod_base = OTHER; note = uridine-3'-phosphate
  modified_base 19: mod_base = OTHER; note = guanosine-3'-phosphate
  misc_feature 1..19: note = RNA
  misc_feature 20..21: note = DNA
gtacgattccggatatttgtt

SEQ ID NO: 2208 - DNA, 21 bp, synthetic construct
  source 1..21: mol_type = other DNA
  modified_base 1: mod_base = OTHER; note = cytidine-3'-phosphate
  modified_base 2: mod_base = OTHER; note = guanosine-3'-phosphate
  modified_base 3: mod_base = OTHER; note = guanosine-3'-phosphate
  modified_base 4: mod_base = OTHER; note = adenosine-3'-phosphate
  modified_base 5: mod_base = OTHER; note = uridine-3'-phosphate
  modified_base 6: mod_base = OTHER; note = adenosine-3'-phosphate
  modified_base 7: mod_base = OTHER; note = uridine-3'-phosphate
  modified_base 8: mod_base = OTHER; note = uridine-3'-phosphate
  modified_base 9: mod_base = OTHER; note = uridine-3'-phosphate
  modified_base 10: mod_base = OTHER; note = guanosine-3'-phosphate
  modified_base 11: mod_base = OTHER; note = adenosine-3'-phosphate
  modified_base 12: mod_base = OTHER; note = adenosine-3'-phosphate
  modified_base 13: mod_base = OTHER; note = cytidine-3'-phosphate
  modified_base 14: mod_base = OTHER; note = uridine-3'-phosphate
  modified_base 15: mod_base = OTHER; note = cytidine-3'-phosphate
  modified_base 16: mod_base = OTHER; note = uridine-3'-phosphate
  modified_base 17: mod_base = OTHER; note = uridine-3'-phosphate
  modified_base 18: mod_base = OTHER; note = uridine-3'-phosphate
  modified_base 19: mod_base = OTHER; note = guanosine-3'-phosphate
  misc_feature 1..19: note = RNA
  misc_feature 20..21: note = DNA
cggatatttgaactctttgtt

SEQ ID NO: 2209 - DNA, 21 bp, synthetic construct
  source 1..21: mol_type = other DNA
  modified_base 1: mod_base = OTHER; note = adenosine-3'-phosphate
  modified_base 2: mod_base = OTHER; note = cytidine-3'-phosphate
  modified_base 3: mod_base = OTHER; note = uridine-3'-phosphate
  modified_base 4: mod_base = OTHER; note = cytidine-3'-phosphate
  modified_base 5: mod_base = OTHER; note = uridine-3'-phosphate
  modified_base 6: mod_base = OTHER; note = uridine-3'-phosphate
  modified_base 7: mod_base = OTHER; note = uridine-3'-phosphate
  modified_base 8: mod_base = OTHER; note = guanosine-3'-phosphate
  modified_base 9: mod_base = OTHER; note = adenosine-3'-phosphate
  modified_base 10: mod_base = OTHER; note = adenosine-3'-phosphate
  modified_base 11: mod_base = OTHER; note = guanosine-3'-phosphate
  modified_base 12: mod_base = OTHER; note = uridine-3'-phosphate
  modified_base 13: mod_base = OTHER; note = uridine-3'-phosphate
  modified_base 14: mod_base = OTHER; note = guanosine-3'-phosphate
  modified_base 15: mod_base = OTHER; note = guanosine-3'-phosphate
  modified_base 16: mod_base = OTHER; note = guanosine-3'-phosphate
  modified_base 17: mod_base = OTHER; note = uridine-3'-phosphate
  modified_base 18: mod_base = OTHER; note = uridine-3'-phosphate
  modified_base 19: mod_base = OTHER; note = uridine-3'-phosphate
  misc_feature 1..19: note = RNA
  misc_feature 20..21: note = DNA
actctttgaagttgggttttt

SEQ ID NO: 2210 - DNA, 21 bp, synthetic construct
  source 1..21: mol_type = other DNA
  modified_base 1: mod_base = OTHER; note = adenosine-3'-phosphate
  modified_base 2: mod_base = OTHER; note = guanosine-3'-phosphate
  modified_base 3: mod_base = OTHER; note = uridine-3'-phosphate
  modified_base 4: mod_base = OTHER; note = uridine-3'-phosphate
  modified_base 5: mod_base = OTHER; note = guanosine-3'-phosphate
  modified_base 6: mod_base = OTHER; note = guanosine-3'-phosphate
  modified_base 7: mod_base = OTHER; note = guanosine-3'-phosphate
  modified_base 8: mod_base = OTHER; note = uridine-3'-phosphate
  modified_base 9: mod_base = OTHER; note = uridine-3'-phosphate
  modified_base 10: mod_base = OTHER; note = uridine-3'-phosphate
  modified_base 11: mod_base = OTHER; note = cytidine-3'-phosphate
  modified_base 12: mod_base = OTHER; note = uridine-3'-phosphate
  modified_base 13: mod_base = OTHER; note = cytidine-3'-phosphate
  modified_base 14: mod_base = OTHER; note = adenosine-3'-phosphate
  modified_base 15: mod_base = OTHER; note = guanosine-3'-phosphate
  modified_base 16: mod_base = OTHER; note = uridine-3'-phosphate
  modified_base 17: mod_base = OTHER; note = cytidine-3'-phosphate
  modified_base 18: mod_base = OTHER; note = cytidine-3'-phosphate
  modified_base 19: mod_base = OTHER; note = uridine-3'-phosphate
  misc_feature 1..19: note = RNA
  misc_feature 20..21: note = DNA
agttgggtttctcagtccttt

SEQ ID NO: 2211 - DNA, 21 bp, synthetic construct
  source 1..21: mol_type = other DNA
  modified_base 1: mod_base = OTHER; note = uridine-3'-phosphate
  modified_base 2: mod_base = OTHER; note = uridine-3'-phosphate
  modified_base 3: mod_base = OTHER; note = cytidine-3'-phosphate
  modified_base 4: mod_base = OTHER; note = uridine-3'-phosphate
  modified_base 5: mod_base = OTHER; note = cytidine-3'-phosphate
  modified_base 6: mod_base = OTHER; note = adenosine-3'-phosphate
  modified_base 7: mod_base = OTHER; note = guanosine-3'-phosphate
  modified_base 8: mod_base = OTHER; note = uridine-3'-phosphate
  modified_base 9: mod_base = OTHER; note = cytidine-3'-phosphate
  modified_base 10: mod_base = OTHER; note = cytidine-3'-phosphate
  modified_base 11: mod_base = OTHER; note = uridine-3'-phosphate
  modified_base 12: mod_base = OTHER; note = guanosine-3'-phosphate
  modified_base 13: mod_base = OTHER; note = cytidine-3'-phosphate
  modified_base 14: mod_base = OTHER; note = cytidine-3'-phosphate
  modified_base 15: mod_base = OTHER; note = adenosine-3'-phosphate
  modified_base 16: mod_base = OTHER; note = cytidine-3'-phosphate
  modified_base 17: mod_base = OTHER; note = uridine-3'-phosphate
  modified_base 18: mod_base = OTHER; note = uridine-3'-phosphate
  modified_base 19: mod_base = OTHER; note = uridine-3'-phosphate
  misc_feature 1..19: note = RNA
  misc_feature 20..21: note = DNA
ttctcagtcctgccacttttt

SEQ ID NO: 2212 - DNA, 21 bp, synthetic construct
  source 1..21: mol_type = other DNA
  modified_base 1: mod_base = OTHER; note = cytidine-3'-phosphate
  modified_base 2: mod_base = OTHER; note = adenosine-3'-phosphate
  modified_base 3: mod_base = OTHER; note = cytidine-3'-phosphate
  modified_base 4: mod_base = OTHER; note = uridine-3'-phosphate
  modified_base 5: mod_base = OTHER; note = uridine-3'-phosphate
  modified_base 6: mod_base = OTHER; note = uridine-3'-phosphate
  modified_base 7: mod_base = OTHER; note = cytidine-3'-phosphate
  modified_base 8: mod_base = OTHER; note = adenosine-3'-phosphate
  modified_base 9: mod_base = OTHER; note = cytidine-3'-phosphate
  modified_base 10: mod_base = OTHER; note = adenosine-3'-phosphate
  modified_base 11: mod_base = OTHER; note = guanosine-3'-phosphate
  modified_base 12: mod_base = OTHER; note = uridine-3'-phosphate
  modified_base 13: mod_base = OTHER; note = guanosine-3'-phosphate
  modified_base 14: mod_base = OTHER; note = uridine-3'-phosphate
  modified_base 15: mod_base = OTHER; note = adenosine-3'-phosphate
  modified_base 16: mod_base = OTHER; note = cytidine-3'-phosphate
  modified_base 17: mod_base = OTHER; note = guanosine-3'-phosphate
  modified_base 18: mod_base = OTHER; note = adenosine-3'-phosphate
  modified_base 19: mod_base = OTHER; note = adenosine-3'-phosphate
  misc_feature 1..19: note = RNA
  misc_feature 20..21: note = DNA
cactttcacagtgtacgaatt

SEQ ID NO: 2213 - DNA, 21 bp, synthetic construct
  source 1..21: mol_type = other DNA
  modified_base 1: mod_base = OTHER; note = cytidine-3'-phosphate
  modified_base 2: mod_base = OTHER; note = adenosine-3'-phosphate
  modified_base 3: mod_base = OTHER; note = cytidine-3'-phosphate
  modified_base 4: mod_base = OTHER; note = adenosine-3'-phosphate
  modified_base 5: mod_base = OTHER; note = guanosine-3'-phosphate
  modified_base 6: mod_base = OTHER; note = uridine-3'-phosphate
  modified_base 7: mod_base = OTHER; note = guanosine-3'-phosphate
  modified_base 8: mod_base = OTHER; note = uridine-3'-phosphate
  modified_base 9: mod_base = OTHER; note = adenosine-3'-phosphate
  modified_base 10: mod_base = OTHER; note = cytidine-3'-phosphate
  modified_base 11: mod_base = OTHER; note = guanosine-3'-phosphate
  modified_base 12: mod_base = OTHER; note = adenosine-3'-phosphate
  modified_base 13: mod_base = OTHER; note = adenosine-3'-phosphate
  modified_base 14: mod_base = OTHER; note = uridine-3'-phosphate
  modified_base 15: mod_base = OTHER; note = adenosine-3'-phosphate
  modified_base 16: mod_base = OTHER; note = cytidine-3'-phosphate
  modified_base 17: mod_base = OTHER; note = cytidine-3'-phosphate
  modified_base 18: mod_base = OTHER; note = adenosine-3'-phosphate
  modified_base 19: mod_base = OTHER; note = cytidine-3'-phosphate
  misc_feature 1..19: note = RNA
  misc_feature 20..21: note = DNA
cacagtgtacgaataccactt

SEQ ID NO: 2214 - DNA, 21 bp, synthetic construct
  source 1..21: mol_type = other DNA
  modified_base 1: mod_base = OTHER; note = adenosine-3'-phosphate
  modified_base 2: mod_base = OTHER; note = cytidine-3'-phosphate
  modified_base 3: mod_base = OTHER; note = cytidine-3'-phosphate
  modified_base 4: mod_base = OTHER; note = adenosine-3'-phosphate
  modified_base 5: mod_base = OTHER; note = cytidine-3'-phosphate
  modified_base 6: mod_base = OTHER; note = adenosine-3'-phosphate
  modified_base 7: mod_base = OTHER; note = guanosine-3'-phosphate
  modified_base 8: mod_base = OTHER; note = adenosine-3'-phosphate
  modified_base 9: mod_base = OTHER; note = cytidine-3'-phosphate
  modified_base 10: mod_base = OTHER; note = cytidine-3'-phosphate
  modified_base 11: mod_base = OTHER; note = adenosine-3'-phosphate
  modified_base 12: mod_base = OTHER; note = guanosine-3'-phosphate
  modified_base 13: mod_base = OTHER; note = adenosine-3'-phosphate
  modified_base 14: mod_base = OTHER; note = uridine-3'-phosphate
  modified_base 15: mod_base = OTHER; note = adenosine-3'-phosphate
  modified_base 16: mod_base = OTHER; note = adenosine-3'-phosphate
  modified_base 17: mod_base = OTHER; note = adenosine-3'-phosphate
  modified_base 18: mod_base = OTHER; note = cytidine-3'-phosphate
  modified_base 19: mod_base = OTHER; note = adenosine-3'-phosphate
  misc_feature 1..19: note = RNA
  misc_feature 20..21: note = DNA
accacagaccagataaacatt

SEQ ID NO: 2215 - DNA, 21 bp, synthetic construct
  source 1..21: mol_type = other DNA
  modified_base 1: mod_base = OTHER; note = cytidine-3'-phosphate
  modified_base 2: mod_base = OTHER; note = cytidine-3'-phosphate
  modified_base 3: mod_base = OTHER; note = adenosine-3'-phosphate
  modified_base 4: mod_base = OTHER; note = guanosine-3'-phosphate
  modified_base 5: mod_base = OTHER; note = adenosine-3'-phosphate
  modified_base 6: mod_base = OTHER; note = uridine-3'-phosphate
  modified_base 7: mod_base = OTHER; note = adenosine-3'-phosphate
  modified_base 8: mod_base = OTHER; note = adenosine-3'-phosphate
  modified_base 9: mod_base = OTHER; note = adenosine-3'-phosphate
  modified_base 10: mod_base = OTHER; note = cytidine-3'-phosphate
  modified_base 11: mod_base = OTHER; note = adenosine-3'-phosphate
  modified_base 12: mod_base = OTHER; note = guanosine-3'-phosphate
  modified_base 13: mod_base = OTHER; note = uridine-3'-phosphate
  modified_base 14: mod_base = OTHER; note = guanosine-3'-phosphate
  modified_base 15: mod_base = OTHER; note = uridine-3'-phosphate
  modified_base 16: mod_base = OTHER; note = adenosine-3'-phosphate
  modified_base 17: mod_base = OTHER; note = cytidine-3'-phosphate
  modified_base 18: mod_base = OTHER; note = cytidine-3'-phosphate
  modified_base 19: mod_base = OTHER; note = adenosine-3'-phosphate
  misc_feature 1..19: note = RNA
  misc_feature 20..21: note = DNA
ccagataaacagtgtaccatt

SEQ ID NO: 2216 - DNA, 21 bp, synthetic construct
  source 1..21: mol_type = other DNA
  modified_base 1: mod_base = OTHER; note = cytidine-3'-phosphate
  modified_base 2: mod_base = OTHER; note = adenosine-3'-phosphate
  modified_base 3: mod_base = OTHER; note = guanosine-3'-phosphate
  modified_base 4: mod_base = OTHER; note = uridine-3'-phosphate
  modified_base 5: mod_base = OTHER; note = guanosine-3'-phosphate
  modified_base 6: mod_base = OTHER; note = uridine-3'-phosphate
  modified_base 7: mod_base = OTHER; note = adenosine-3'-phosphate
  modified_base 8: mod_base = OTHER; note = cytidine-3'-phosphate
  modified_base 9: mod_base = OTHER; note = cytidine-3'-phosphate
  modified_base 10: mod_base = OTHER; note = adenosine-3'-phosphate
  modified_base 11: mod_base = OTHER; note = uridine-3'-phosphate
  modified_base 12: mod_base = OTHER; note = guanosine-3'-phosphate
  modified_base 13: mod_base = OTHER; note = uridine-3'-phosphate
  modified_base 14: mod_base = OTHER; note = uridine-3'-phosphate
  modified_base 15: mod_base = OTHER; note = uridine-3'-phosphate
  modified_base 16: mod_base = OTHER; note = uridine-3'-phosphate
  modified_base 17: mod_base = OTHER; note = adenosine-3'-phosphate
  modified_base 18: mod_base = OTHER; note = uridine-3'-phosphate
  modified_base 19: mod_base = OTHER; note = adenosine-3'-phosphate
  misc_feature 1..19: note = RNA
  misc_feature 20..21: note = DNA
cagtgtaccatgttttatatt

SEQ ID NO: 2217 - DNA, 21 bp, synthetic construct
  source 1..21: mol_type = other DNA
  modified_base 1: mod_base = OTHER; note = guanosine-3'-phosphate
  modified_base 2: mod_base = OTHER; note = uridine-3'-phosphate
  modified_base 3: mod_base = OTHER; note = uridine-3'-phosphate
  modified_base 4: mod_base = OTHER; note = uridine-3'-phosphate
  modified_base 5: mod_base = OTHER; note = uridine-3'-phosphate
  modified_base 6: mod_base = OTHER; note = adenosine-3'-phosphate
  modified_base 7: mod_base = OTHER; note = uridine-3'-phosphate
  modified_base 8: mod_base = OTHER; note = adenosine-3'-phosphate
  modified_base 9: mod_base = OTHER; note = guanosine-3'-phosphate
  modified_base 10: mod_base = OTHER; note = cytidine-3'-phosphate
  modified_base 11: mod_base = OTHER; note = adenosine-3'-phosphate
  modified_base 12: mod_base = OTHER; note = cytidine-3'-phosphate
  modified_base 13: mod_base = OTHER; note = uridine-3'-phosphate
  modified_base 14: mod_base = OTHER; note = uridine-3'-phosphate
  modified_base 15: mod_base = OTHER; note = cytidine-3'-phosphate
  modified_base 16: mod_base = OTHER; note = cytidine-3'-phosphate
  modified_base 17: mod_base = OTHER; note = adenosine-3'-phosphate
  modified_base 18: mod_base = OTHER; note = adenosine-3'-phosphate
  modified_base 19: mod_base = OTHER; note = uridine-3'-phosphate
  misc_feature 1..19: note = RNA
  misc_feature 20..21: note = DNA
gttttatagcacttccaattt

SEQ ID NO: 2218 - DNA, 21 bp, synthetic construct
  source 1..21: mol_type = other DNA
  modified_base 1: mod_base = OTHER; note = cytidine-3'-phosphate
  modified_base 2: mod_base = OTHER; note = uridine-3'-phosphate
  modified_base 3: mod_base = OTHER; note = uridine-3'-phosphate
  modified_base 4: mod_base = OTHER; note = cytidine-3'-phosphate
  modified_base 5: mod_base = OTHER; note = cytidine-3'-phosphate
  modified_base 6: mod_base = OTHER; note = adenosine-3'-phosphate
  modified_base 7: mod_base = OTHER; note = adenosine-3'-phosphate
  modified_base 8: mod_base = OTHER; note = uridine-3'-phosphate
  modified_base 9: mod_base = OTHER; note = adenosine-3'-phosphate
  modified_base 10: mod_base = OTHER; note = uridine-3'-phosphate
  modified_base 11: mod_base = OTHER; note = cytidine-3'-phosphate
  modified_base 12: mod_base = OTHER; note = adenosine-3'-phosphate
  modified_base 13: mod_base = OTHER; note = adenosine-3'-phosphate
  modified_base 14: mod_base = OTHER; note = adenosine-3'-phosphate
  modified_base 15: mod_base = OTHER; note = adenosine-3'-phosphate
  modified_base 16: mod_base = OTHER; note = uridine-3'-phosphate
  modified_base 17: mod_base = OTHER; note = uridine-3'-phosphate
  modified_base 18: mod_base = OTHER; note = cytidine-3'-phosphate
  modified_base 19: mod_base = OTHER; note = adenosine-3'-phosphate
  misc_feature 1..19: note = RNA
  misc_feature 20..21: note = DNA
cttccaatatcaaaattcatt

SEQ ID NO: 2219 - DNA, 21 bp, synthetic construct
  source 1..21: mol_type = other DNA
  modified_base 1: mod_base = OTHER; note = adenosine-3'-phosphate
  modified_base 2: mod_base = OTHER; note = uridine-3'-phosphate
  modified_base 3: mod_base = OTHER; note = cytidine-3'-phosphate
  modified_base 4: mod_base = OTHER; note = adenosine-3'-phosphate
  modified_base 5: mod_base = OTHER; note = adenosine-3'-phosphate
  modified_base 6: mod_base = OTHER; note = adenosine-3'-phosphate
  modified_base 7: mod_base = OTHER; note = adenosine-3'-phosphate
  modified_base 8: mod_base = OTHER; note = uridine-3'-phosphate
  modified_base 9: mod_base = OTHER; note = uridine-3'-phosphate
  modified_base 10: mod_base = OTHER; note = cytidine-3'-phosphate
  modified_base 11: mod_base = OTHER; note = adenosine-3'-phosphate
  modified_base 12: mod_base = OTHER; note = guanosine-3'-phosphate
  modified_base 13: mod_base = OTHER; note = adenosine-3'-phosphate
  modified_base 14: mod_base = OTHER; note = adenosine-3'-phosphate
  modified_base 15: mod_base = OTHER; note = adenosine-3'-phosphate
  modified_base 16: mod_base = OTHER; note = guanosine-3'-phosphate
  modified_base 17: mod_base = OTHER; note = uridine-3'-phosphate
  modified_base 18: mod_base = OTHER; note = cytidine-3'-phosphate
  modified_base 19: mod_base = OTHER; note = uridine-3'-phosphate
  misc_feature 1..19: note = RNA
  misc_feature 20..21: note = DNA
atcaaaattcagaaagtcttt

SEQ ID NO: 2220 - DNA, 21 bp, synthetic construct
  source 1..21: mol_type = other DNA
  modified_base 1: mod_base = OTHER; note = guanosine-3'-phosphate
  modified_base 2: mod_base = OTHER; note = adenosine-3'-phosphate
  modified_base 3: mod_base = OTHER; note = adenosine-3'-phosphate
  modified_base 4: mod_base = OTHER; note = adenosine-3'-phosphate
  modified_base 5: mod_base = OTHER; note = guanosine-3'-phosphate
  modified_base 6: mod_base = OTHER; note = uridine-3'-phosphate
  modified_base 7: mod_base = OTHER; note = cytidine-3'-phosphate
  modified_base 8: mod_base = OTHER; note = uridine-3'-phosphate
  modified_base 9: mod_base = OTHER; note = guanosine-3'-phosphate
  modified_base 10: mod_base = OTHER; note = uridine-3'-phosphate
  modified_base 11: mod_base = OTHER; note = guanosine-3'-phosphate
  modified_base 12: mod_base = OTHER; note = adenosine-3'-phosphate
  modified_base 13: mod_base = OTHER; note = adenosine-3'-phosphate
  modified_base 14: mod_base = OTHER; note = guanosine-3'-phosphate
  modified_base 15: mod_base = OTHER; note = guanosine-3'-phosphate
  modified_base 16: mod_base = OTHER; note = adenosine-3'-phosphate
  modified_base 17: mod_base = OTHER; note = guanosine-3'-phosphate
  modified_base 18: mod_base = OTHER; note = cytidine-3'-phosphate
  modified_base 19: mod_base = OTHER; note = cytidine-3'-phosphate
  misc_feature 1..19: note = RNA
  misc_feature 20..21: note = DNA
gaaagtctgtgaaggagcctt

SEQ ID NO: 2221 - DNA, 21 bp, synthetic construct
  source 1..21: mol_type = other DNA
  modified_base 1: mod_base = OTHER; note = guanosine-3'-phosphate
  modified_base 2: mod_base = OTHER; note = adenosine-3'-phosphate
  modified_base 3: mod_base = OTHER; note = adenosine-3'-phosphate
  modified_base 4: mod_base = OTHER; note = guanosine-3'-phosphate
  modified_base 5: mod_base = OTHER; note = guanosine-3'-phosphate
  modified_base 6: mod_base = OTHER; note = adenosine-3'-phosphate
  modified_base 7: mod_base = OTHER; note = guanosine-3'-phosphate
  modified_base 8: mod_base = OTHER; note = cytidine-3'-phosphate
  modified_base 9: mod_base = OTHER; note = cytidine-3'-phosphate
  modified_base 10: mod_base = OTHER; note = guanosine-3'-phosphate
  modified_base 11: mod_base = OTHER; note = cytidine-3'-phosphate
  modified_base 12: mod_base = OTHER; note = guanosine-3'-phosphate
  modified_base 13: mod_base = OTHER; note = uridine-3'-phosphate
  modified_base 14: mod_base = OTHER; note = guanosine-3'-phosphate
  modified_base 15: mod_base = OTHER; note = cytidine-3'-phosphate
  modified_base 16: mod_base = OTHER; note = adenosine-3'-phosphate
  modified_base 17: mod_base = OTHER; note = adenosine-3'-phosphate
  modified_base 18: mod_base = OTHER; note = guanosine-3'-phosphate
  modified_base 19: mod_base = OTHER; note = uridine-3'-phosphate
  misc_feature 1..19: note = RNA
  misc_feature 20..21: note = DNA
gaaggagccgcgtgcaagttt

SEQ ID NO: 2222 - DNA, 21 bp, synthetic construct
  source 1..21: mol_type = other DNA
  modified_base 1: mod_base = OTHER; note = cytidine-3'-phosphate
  modified_base 2: mod_base = OTHER; note = guanosine-3'-phosphate
  modified_base 3: mod_base = OTHER; note = uridine-3'-phosphate
  modified_base 4: mod_base = OTHER; note = guanosine-3'-phosphate
  modified_base 5: mod_base = OTHER; note = cytidine-3'-phosphate
  modified_base 6: mod_base = OTHER; note = adenosine-3'-phosphate
  modified_base 7: mod_base = OTHER; note = adenosine-3'-phosphate
  modified_base 8: mod_base = OTHER; note = guanosine-3'-phosphate
  modified_base 9: mod_base = OTHER; note = uridine-3'-phosphate
  modified_base 10: mod_base = OTHER; note = guanosine-3'-phosphate
  modified_base 11: mod_base = OTHER; note = uridine-3'-phosphate
  modified_base 12: mod_base = OTHER; note = guanosine-3'-phosphate
  modified_base 13: mod_base = OTHER; note = uridine-3'-phosphate
  modified_base 14: mod_base = OTHER; note = adenosine-3'-phosphate
  modified_base 15: mod_base = OTHER; note = guanosine-3'-phosphate
  modified_base 16: mod_base = OTHER; note = adenosine-3'-phosphate
  modified_base 17: mod_base = OTHER; note = adenosine-3'-phosphate
  modified_base 18: mod_base = OTHER; note = guanosine-3'-phosphate
  modified_base 19: mod_base = OTHER; note = cytidine-3'-phosphate
  misc_feature 1..19: note = RNA
  misc_feature 20..21: note = DNA
cgtgcaagtgtgtagaagctt

SEQ ID NO: 2223 - DNA, 21 bp, synthetic construct
  source 1..21: mol_type = other DNA
  modified_base 1: mod_base = OTHER; note = guanosine-3'-phosphate
  modified_base 2: mod_base = OTHER; note = uridine-3'-phosphate
  modified_base 3: mod_base = OTHER; note = adenosine-3'-phosphate
  modified_base 4: mod_base = OTHER; note = guanosine-3'-phosphate
  modified_base 5: mod_base = OTHER; note = adenosine-3'-phosphate
  modified_base 6: mod_base = OTHER; note = adenosine-3'-phosphate
  modified_base 7: mod_base = OTHER; note = guanosine-3'-phosphate
  modified_base 8: mod_base = OTHER; note = cytidine-3'-phosphate
  modified_base 9: mod_base = OTHER; note = uridine-3'-phosphate
  modified_base 10: mod_base = OTHER; note = guanosine-3'-phosphate
  modified_base 11: mod_base = OTHER; note = adenosine-3'-phosphate
  modified_base 12: mod_base = OTHER; note = uridine-3'-phosphate
  modified_base 13: mod_base = OTHER; note = uridine-3'-phosphate
  modified_base 14: mod_base = OTHER; note = guanosine-3'-phosphate
  modified_base 15: mod_base = OTHER; note = uridine-3'-phosphate
  modified_base 16: mod_base = OTHER; note = guanosine-3'-phosphate
  modified_base 17: mod_base = OTHER; note = guanosine-3'-phosphate
  modified_base 18: mod_base = OTHER; note = guanosine-3'-phosphate
  modified_base 19: mod_base = OTHER; note = cytidine-3'-phosphate
  misc_feature 1..19: note = RNA
  misc_feature 20..21: note = DNA
gtagaagctgattgtgggctt

SEQ ID NO: 2224 - DNA, 21 bp, synthetic construct
  source 1..21: mol_type = other DNA
  modified_base 1: mod_base = OTHER; note = cytidine-3'-phosphate
  modified_base 2: mod_base = OTHER; note = uridine-3'-phosphate
  modified_base 3: mod_base = OTHER; note = guanosine-3'-phosphate
  modified_base 4: mod_base = OTHER; note = adenosine-3'-phosphate
  modified_base 5: mod_base = OTHER; note = uridine-3'-phosphate
  modified_base 6: mod_base = OTHER; note = uridine-3'-phosphate
  modified_base 7: mod_base = OTHER; note = guanosine-3'-phosphate
  modified_base 8: mod_base = OTHER; note = uridine-3'-phosphate
  modified_base 9: mod_base = OTHER; note = guanosine-3'-phosphate
  modified_base 10: mod_base = OTHER; note = guanosine-3'-phosphate
  modified_base 11: mod_base = OTHER; note = guanosine-3'-phosphate
  modified_base 12: mod_base = OTHER; note = cytidine-3'-phosphate
  modified_base 13: mod_base = OTHER; note = adenosine-3'-phosphate
  modified_base 14: mod_base = OTHER; note = adenosine-3'-phosphate
  modified_base 15: mod_base = OTHER; note = adenosine-3'-phosphate
  modified_base 16: mod_base = OTHER; note = uridine-3'-phosphate
  modified_base 17: mod_base = OTHER; note = guanosine-3'-phosphate
  modified_base 18: mod_base = OTHER; note = cytidine-3'-phosphate
  modified_base 19: mod_base = OTHER; note = adenosine-3'-phosphate
  misc_feature 1..19: note = RNA
  misc_feature 20..21: note = DNA
ctgattgtgggcaaatgcatt

SEQ ID NO: 2225 - DNA, 21 bp, synthetic construct
  source 1..21: mol_type = other DNA
  modified_base 1: mod_base = OTHER; note = guanosine-3'-phosphate
  modified_base 2: mod_base = OTHER; note = cytidine-3'-phosphate
  modified_base 3: mod_base = OTHER; note = adenosine-3'-phosphate
  modified_base 4: mod_base = OTHER; note = adenosine-3'-phosphate
  modified_base 5: mod_base = OTHER; note = adenosine-3'-phosphate
  modified_base 6: mod_base = OTHER; note = uridine-3'-phosphate
  modified_base 7: mod_base = OTHER; note = guanosine-3'-phosphate
  modified_base 8: mod_base = OTHER; note = cytidine-3'-phosphate
  modified_base 9: mod_base = OTHER; note = adenosine-3'-phosphate
  modified_base 10: mod_base = OTHER; note = guanosine-3'-phosphate
  modified_base 11: mod_base = OTHER; note = guanosine-3'-phosphate
  modified_base 12: mod_base = OTHER; note = adenosine-3'-phosphate
  modified_base 13: mod_base = OTHER; note = adenosine-3'-phosphate
  modified_base 14: mod_base = OTHER; note = guanosine-3'-phosphate
  modified_base 15: mod_base = OTHER; note = adenosine-3'-phosphate
  modified_base 16: mod_base = OTHER; note = adenosine-3'-phosphate
  modified_base 17: mod_base = OTHER; note = uridine-3'-phosphate
  modified_base 18: mod_base = OTHER; note = uridine-3'-phosphate
  modified_base 19: mod_base = OTHER; note = guanosine-3'-phosphate
  misc_feature 1..19: note = RNA
  misc_feature 20..21: note = DNA
gcaaatgcaggaagaattgtt

SEQ ID NO: 2226 - DNA, 21 bp, synthetic construct
  source 1..21: mol_type = other DNA
  modified_base 1: mod_base = OTHER; note = guanosine-3'-phosphate
  modified_base 2: mod_base = OTHER; note = adenosine-3'-phosphate
  modified_base 3: mod_base = OTHER; note = adenosine-3'-phosphate
  modified_base 4: mod_base = OTHER; note = guanosine-3'-phosphate
  modified_base 5: mod_base = OTHER; note = adenosine-3'-phosphate
  modified_base 6: mod_base = OTHER; note = adenosine-3'-phosphate
  modified_base 7: mod_base = OTHER; note = uridine-3'-phosphate
  modified_base 8: mod_base = OTHER; note = uridine-3'-phosphate
  modified_base 9: mod_base = OTHER; note = guanosine-3'-phosphate
  modified_base 10: mod_base = OTHER; note = guanosine-3'-phosphate
  modified_base 11: mod_base = OTHER; note = adenosine-3'-phosphate
  modified_base 12: mod_base = OTHER; note = uridine-3'-phosphate
  modified_base 13: mod_base = OTHER; note = cytidine-3'-phosphate
  modified_base 14: mod_base = OTHER; note = uridine-3'-phosphate
  modified_base 15: mod_base = OTHER; note = guanosine-3'-phosphate
  modified_base 16: mod_base = OTHER; note = adenosine-3'-phosphate
  modified_base 17: mod_base = OTHER; note = cytidine-3'-phosphate
  modified_base 18: mod_base = OTHER; note = adenosine-3'-phosphate
  modified_base 19: mod_base = OTHER; note = adenosine-3'-phosphate
  misc_feature 1..19: note = RNA
  misc_feature 20..21: note = DNA
gaagaattggatctgacaatt

SEQ ID NO: 2227 - DNA, 21 bp, synthetic construct
  source 1..21: mol_type = other DNA
  modified_base 1: mod_base = OTHER; note = cytidine-3'-phosphate
  modified_base 2: mod_base = OTHER; note = uridine-3'-phosphate
  modified_base 3: mod_base = OTHER; note = guanosine-3'-phosphate
  modified_base 4: mod_base = OTHER; note = adenosine-3'-phosphate
  modified_base 5: mod_base = OTHER; note = cytidine-3'-phosphate
  modified_base 6: mod_base = OTHER; note = adenosine-3'-phosphate
  modified_base 7: mod_base = OTHER; note = adenosine-3'-phosphate
  modified_base 8: mod_base = OTHER; note = uridine-3'-phosphate
  modified_base 9: mod_base = OTHER; note = cytidine-3'-phosphate
  modified_base 10: mod_base = OTHER; note = uridine-3'-phosphate
  modified_base 11: mod_base = OTHER; note = cytidine-3'-phosphate
  modified_base 12: mod_base = OTHER; note = uridine-3'-phosphate
  modified_base 13: mod_base = OTHER; note = guanosine-3'-phosphate
  modified_base 14: mod_base = OTHER; note = cytidine-3'-phosphate
  modified_base 15: mod_base = OTHER; note = adenosine-3'-phosphate
  modified_base 16: mod_base = OTHER; note = guanosine-3'-phosphate
  modified_base 17: mod_base = OTHER; note = adenosine-3'-phosphate
  modified_base 18: mod_base = OTHER; note = guanosine-3'-phosphate
  modified_base 19: mod_base = OTHER; note = adenosine-3'-phosphate
  misc_feature 1..19: note = RNA
  misc_feature 20..21: note = DNA
ctgacaatctctgcagagatt

SEQ ID NO: 2228 - DNA, 21 bp, synthetic construct
  source 1..21: mol_type = other DNA
  modified_base 1: mod_base = OTHER; note = guanosine-3'-phosphate
  modified_base 2: mod_base = OTHER; note = cytidine-3'-phosphate
  modified_base 3: mod_base = OTHER; note = adenosine-3'-phosphate
  modified_base 4: mod_base = OTHER; note = guanosine-3'-phosphate
  modified_base 5: mod_base = OTHER; note = adenosine-3'-phosphate
  modified_base 6: mod_base = OTHER; note = guanosine-3'-phosphate
  modified_base 7: mod_base = OTHER; note = adenosine-3'-phosphate
  modified_base 8: mod_base = OTHER; note = cytidine-3'-phosphate
  modified_base 9: mod_base = OTHER; note = adenosine-3'-phosphate
  modified_base 10: mod_base = OTHER; note = adenosine-3'-phosphate
  modified_base 11: mod_base = OTHER; note = guanosine-3'-phosphate
  modified_base 12: mod_base = OTHER; note = adenosine-3'-phosphate
  modified_base 13: mod_base = OTHER; note = adenosine-3'-phosphate
  modified_base 14: mod_base = OTHER; note = adenosine-3'-phosphate
  modified_base 15: mod_base = OTHER; note = adenosine-3'-phosphate
  modified_base 16: mod_base = OTHER; note = cytidine-3'-phosphate
  modified_base 17: mod_base = OTHER; note = adenosine-3'-phosphate
  modified_base 18: mod_base = OTHER; note = adenosine-3'-phosphate
  modified_base 19: mod_base = OTHER; note = adenosine-3'-phosphate
  misc_feature 1..19: note = RNA
  misc_feature 20..21: note = DNA
gcagagacaagaaaacaaatt

SEQ ID NO: 2229 - DNA, 21 bp, synthetic construct
  source 1..21: mol_type = other DNA
  modified_base 1: mod_base = OTHER; note = cytidine-3'-phosphate
  modified_base 2: mod_base = OTHER; note = adenosine-3'-phosphate
  modified_base 3: mod_base = OTHER; note = adenosine-3'-phosphate
  modified_base 4: mod_base = OTHER; note = guanosine-3'-phosphate
  modified_base 5: mod_base = OTHER; note = adenosine-3'-phosphate
  modified_base 6: mod_base = OTHER; note = adenosine-3'-phosphate
  modified_base 7: mod_base = OTHER; note = adenosine-3'-phosphate
  modified_base 8: mod_base = OTHER; note = adenosine-3'-phosphate
  modified_base 9: mod_base = OTHER; note = cytidine-3'-phosphate
  modified_base 10: mod_base = OTHER; note = adenosine-3'-phosphate
  modified_base 11: mod_base = OTHER; note = adenosine-3'-phosphate
  modified_base 12: mod_base = OTHER; note = adenosine-3'-phosphate
  modified_base 13: mod_base = OTHER; note = cytidine-3'-phosphate
  modified_base 14: mod_base = OTHER; note = adenosine-3'-phosphate
  modified_base 15: mod_base = OTHER; note = guanosine-3'-phosphate
  modified_base 16: mod_base = OTHER; note = cytidine-3'-phosphate
  modified_base 17: mod_base = OTHER; note = adenosine-3'-phosphate
  modified_base 18: mod_base = OTHER; note = uridine-3'-phosphate
  modified_base 19: mod_base = OTHER; note = guanosine-3'-phosphate
  misc_feature 1..19: note = RNA
  misc_feature 20..21: note = DNA
caagaaaacaaacagcatgtt

SEQ ID NO: 2230 - DNA, 21 bp, synthetic construct
  source 1..21: mol_type = other DNA
  modified_base 1: mod_base = OTHER; note = adenosine-3'-phosphate
  modified_base 2: mod_base = OTHER; note = cytidine-3'-phosphate
  modified_base 3: mod_base = OTHER; note = adenosine-3'-phosphate
  modified_base 4: mod_base = OTHER; note = guanosine-3'-phosphate
  modified_base 5: mod_base = OTHER; note = cytidine-3'-phosphate
  modified_base 6: mod_base = OTHER; note = adenosine-3'-phosphate
  modified_base 7: mod_base = OTHER; note = uridine-3'-phosphate
  modified_base 8: mod_base = OTHER; note = guanosine-3'-phosphate
  modified_base 9: mod_base = OTHER; note = uridine-3'-phosphate
  modified_base 10: mod_base = OTHER; note = adenosine-3'-phosphate
  modified_base 11: mod_base = OTHER; note = adenosine-3'-phosphate
  modified_base 12: mod_base = OTHER; note = adenosine-3'-phosphate
  modified_base 13: mod_base = OTHER; note = cytidine-3'-phosphate
  modified_base 14: mod_base = OTHER; note = cytidine-3'-phosphate
  modified_base 15: mod_base = OTHER; note = adenosine-3'-phosphate
  modified_base 16: mod_base = OTHER; note = guanosine-3'-phosphate
  modified_base 17: mod_base = OTHER; note = adenosine-3'-phosphate
  modified_base 18: mod_base = OTHER; note = guanosine-3'-phosphate
  modified_base 19: mod_base = OTHER; note = adenosine-3'-phosphate
  misc_feature 1..19: note = RNA
  misc_feature 20..21: note = DNA
acagcatgtaaaccagagatt

SEQ ID NO: 2231 - DNA, 21 bp, synthetic construct
  source 1..21: mol_type = other DNA
  modified_base 1: mod_base = OTHER; note = cytidine-3'-phosphate
  modified_base 2: mod_base = OTHER; note = cytidine-3'-phosphate
  modified_base 3: mod_base = OTHER; note = adenosine-3'-phosphate
  modified_base 4: mod_base = OTHER; note = guanosine-3'-phosphate
  modified_base 5: mod_base = OTHER; note = adenosine-3'-phosphate
  modified_base 6: mod_base = OTHER; note = guanosine-3'-phosphate
  modified_base 7: mod_base = OTHER; note = adenosine-3'-phosphate
  modified_base 8: mod_base = OTHER; note = uridine-3'-phosphate
  modified_base 9: mod_base = OTHER; note = uridine-3'-phosphate
  modified_base 10: mod_base = OTHER; note = guanosine-3'-phosphate
  modified_base 11: mod_base = OTHER; note = cytidine-3'-phosphate
  modified_base 12: mod_base = OTHER; note = adenosine-3'-phosphate
  modified_base 13: mod_base = OTHER; note = uridine-3'-phosphate
  modified_base 14: mod_base = OTHER; note = adenosine-3'-phosphate
  modified_base 15: mod_base = OTHER; note = uridine-3'-phosphate
  modified_base 16: mod_base = OTHER; note = guanosine-3'-phosphate
  modified_base 17: mod_base = OTHER; note = cytidine-3'-phosphate
  modified_base 18: mod_base = OTHER; note = uridine-3'-phosphate
  modified_base 19: mod_base = OTHER; note = uridine-3'-phosphate
  misc_feature 1..19: note = RNA
  misc_feature 20..21: note = DNA
ccagagattgcatatgctttt

SEQ ID NO: 2232 - DNA, 21 bp, synthetic construct
  source 1..21: mol_type = other DNA
  modified_base 1: mod_base = OTHER; note = guanosine-3'-phosphate
  modified_base 2: mod_base = OTHER; note = cytidine-3'-phosphate
  modified_base 3: mod_base = OTHER; note = adenosine-3'-phosphate
  modified_base 4: mod_base = OTHER; note = uridine-3'-phosphate
  modified_base 5: mod_base = OTHER; note = adenosine-3'-phosphate
  modified_base 6: mod_base = OTHER; note = uridine-3'-phosphate
  modified_base 7: mod_base = OTHER; note = guanosine-3'-phosphate
  modified_base 8: mod_base = OTHER; note = cytidine-3'-phosphate
  modified_base 9: mod_base = OTHER; note = uridine-3'-phosphate
  modified_base 10: mod_base = OTHER; note = uridine-3'-phosphate
  modified_base 11: mod_base = OTHER; note = adenosine-3'-phosphate
  modified_base 12: mod_base = OTHER; note = uridine-3'-phosphate
  modified_base 13: mod_base = OTHER; note = adenosine-3'-phosphate
  modified_base 14: mod_base = OTHER; note = adenosine-3'-phosphate
  modified_base 15: mod_base = OTHER; note = adenosine-3'-phosphate
  modified_base 16: mod_base = OTHER; note = guanosine-3'-phosphate
  modified_base 17: mod_base = OTHER; note = uridine-3'-phosphate
  modified_base 18: mod_base = OTHER; note = uridine-3'-phosphate
  modified_base 19: mod_base = OTHER; note = adenosine-3'-phosphate
  misc_feature 1..19: note = RNA
  misc_feature 20..21: note = DNA
gcatatgcttataaagttatt

SEQ ID NO: 2233 - DNA, 21 bp, synthetic construct
  source 1..21: mol_type = other DNA
  modified_base 1: mod_base = OTHER; note = uridine-3'-phosphate
  modified_base 2: mod_base = OTHER; note = uridine-3'-phosphate
  modified_base 3: mod_base = OTHER; note = adenosine-3'-phosphate
  modified_base 4: mod_base = OTHER; note = uridine-3'-phosphate
  modified_base 5: mod_base = OTHER; note = adenosine-3'-phosphate
  modified_base 6: mod_base = OTHER; note = adenosine-3'-phosphate
  modified_base 7: mod_base = OTHER; note = adenosine-3'-phosphate
  modified_base 8: mod_base = OTHER; note = guanosine-3'-phosphate
  modified_base 9: mod_base = OTHER; note = uridine-3'-phosphate
  modified_base 10: mod_base = OTHER; note = uridine-3'-phosphate
  modified_base 11: mod_base = OTHER; note = adenosine-3'-phosphate
  modified_base 12: mod_base = OTHER; note = guanosine-3'-phosphate
  modified_base 13: mod_base = OTHER; note = cytidine-3'-phosphate
  modified_base 14: mod_base = OTHER; note = adenosine-3'-phosphate
  modified_base 15: mod_base = OTHER; note = uridine-3'-phosphate
  modified_base 16: mod_base = OTHER; note = cytidine-3'-phosphate
  modified_base 17: mod_base = OTHER; note = adenosine-3'-phosphate
  modified_base 18: mod_base = OTHER; note = cytidine-3'-phosphate
  modified_base 19: mod_base = OTHER; note = adenosine-3'-phosphate
  misc_feature 1..19: note = RNA
  misc_feature 20..21: note = DNA
ttataaagttagcatcacatt

SEQ ID NO: 2234 - DNA, 21 bp, synthetic construct
  source 1..21: mol_type = other DNA
  modified_base 1: mod_base = OTHER; note = cytidine-3'-phosphate
  modified_base 2: mod_base = OTHER; note = adenosine-3'-phosphate
  modified_base 3: mod_base = OTHER; note = uridine-3'-phosphate
  modified_base 4: mod_base = OTHER; note = cytidine-3'-phosphate
  modified_base 5: mod_base = OTHER; note = adenosine-3'-phosphate
  modified_base 6: mod_base = OTHER; note = cytidine-3'-phosphate
  modified_base 7: mod_base = OTHER; note = adenosine-3'-phosphate
  modified_base 8: mod_base = OTHER; note = uridine-3'-phosphate
  modified_base 9: mod_base = OTHER; note = cytidine-3'-phosphate
  modified_base 10: mod_base = OTHER; note = cytidine-3'-phosphate
  modified_base 11: mod_base = OTHER; note = adenosine-3'-phosphate
  modified_base 12: mod_base = OTHER; note = uridine-3'-phosphate
  modified_base 13: mod_base = OTHER; note = cytidine-3'-phosphate
  modified_base 14: mod_base = OTHER; note = adenosine-3'-phosphate
  modified_base 15: mod_base = OTHER; note = cytidine-3'-phosphate
  modified_base 16: mod_base = OTHER; note = uridine-3'-phosphate
  modified_base 17: mod_base = OTHER; note = guanosine-3'-phosphate
  modified_base 18: mod_base = OTHER; note = uridine-3'-phosphate
  modified_base 19: mod_base = OTHER; note = adenosine-3'-phosphate
  misc_feature 1..19: note = RNA
  misc_feature 20..21: note = DNA
catcacatccatcactgtatt

SEQ ID NO: 2235 - DNA, 21 bp, synthetic construct
  source 1..21: mol_type = other DNA
  modified_base 1: mod_base = OTHER; note = uridine-3'-phosphate
  modified_base 2: mod_base = OTHER; note = cytidine-3'-phosphate
  modified_base 3: mod_base = OTHER; note = adenosine-3'-phosphate
  modified_base 4: mod_base = OTHER; note = cytidine-3'-phosphate
  modified_base 5: mod_base = OTHER; note = uridine-3'-phosphate
  modified_base 6: mod_base = OTHER; note = guanosine-3'-phosphate
  modified_base 7: mod_base = OTHER; note = uridine-3'-phosphate
  modified_base 8: mod_base = OTHER; note = adenosine-3'-phosphate
  modified_base 9: mod_base = OTHER; note = guanosine-3'-phosphate
  modified_base 10: mod_base = OTHER; note = adenosine-3'-phosphate
  modified_base 11: mod_base = OTHER; note = adenosine-3'-phosphate
  modified_base 12: mod_base = OTHER; note = adenosine-3'-phosphate
  modified_base 13: mod_base = OTHER; note = adenosine-3'-phosphate
  modified_base 14: mod_base = OTHER; note = uridine-3'-phosphate
  modified_base 15: mod_base = OTHER; note = guanosine-3'-phosphate
  modified_base 16: mod_base = OTHER; note = uridine-3'-phosphate
  modified_base 17: mod_base = OTHER; note = uridine-3'-phosphate
  modified_base 18: mod_base = OTHER; note = uridine-3'-phosphate
  modified_base 19: mod_base = OTHER; note = uridine-3'-phosphate
  misc_feature 1..19: note = RNA
  misc_feature 20..21: note = DNA
tcactgtagaaaatgtttttt

SEQ ID NO: 2236 - DNA, 21 bp, synthetic construct
  source 1..21: mol_type = other DNA
  modified_base 1: mod_base = OTHER; note = adenosine-3'-phosphate
  modified_base 2: mod_base = OTHER; note = guanosine-3'-phosphate
  modified_base 3: mod_base = OTHER; note = adenosine-3'-phosphate
  modified_base 4: mod_base = OTHER; note = adenosine-3'-phosphate
  modified_base 5: mod_base = OTHER; note = adenosine-3'-phosphate
  modified_base 6: mod_base = OTHER; note = adenosine-3'-phosphate
  modified_base 7: mod_base = OTHER; note = uridine-3'-phosphate
  modified_base 8: mod_base = OTHER; note = guanosine-3'-phosphate
  modified_base 9: mod_base = OTHER; note = uridine-3'-phosphate
  modified_base 10: mod_base = OTHER; note = uridine-3'-phosphate
  modified_base 11: mod_base = OTHER; note = uridine-3'-phosphate
  modified_base 12: mod_base = OTHER; note = uridine-3'-phosphate
  modified_base 13: mod_base = OTHER; note = uridine-3'-phosphate
  modified_base 14: mod_base = OTHER; note = guanosine-3'-phosphate
  modified_base 15: mod_base = OTHER; note = uridine-3'-phosphate
  modified_base 16: mod_base = OTHER; note = cytidine-3'-phosphate
  modified_base 17: mod_base = OTHER; note = adenosine-3'-phosphate
  modified_base 18: mod_base = OTHER; note = adenosine-3'-phosphate
  modified_base 19: mod_base = OTHER; note = guanosine-3'-phosphate
  misc_feature 1..19: note = RNA
  misc_feature 20..21: note = DNA
agaaaatgtttttgtcaagtt

SEQ ID NO: 2237 - DNA, 21 bp, synthetic construct
  source 1..21: mol_type = other DNA
  modified_base 1: mod_base = OTHER; note = uridine-3'-phosphate
  modified_base 2: mod_base = OTHER; note = uridine-3'-phosphate
  modified_base 3: mod_base = OTHER; note = uridine-3'-phosphate
  modified_base 4: mod_base = OTHER; note = guanosine-3'-phosphate
  modified_base 5: mod_base = OTHER; note = uridine-3'-phosphate
  modified_base 6: mod_base = OTHER; note = cytidine-3'-phosphate
  modified_base 7: mod_base = OTHER; note = adenosine-3'-phosphate
  modified_base 8: mod_base = OTHER; note = adenosine-3'-phosphate
  modified_base 9: mod_base = OTHER; note = guanosine-3'-phosphate
  modified_base 10: mod_base = OTHER; note = uridine-3'-phosphate
  modified_base 11: mod_base = OTHER; note = adenosine-3'-phosphate
  modified_base 12: mod_base = OTHER; note = cytidine-3'-phosphate
  modified_base 13: mod_base = OTHER; note = adenosine-3'-phosphate
  modified_base 14: mod_base = OTHER; note = adenosine-3'-phosphate
  modified_base 15: mod_base = OTHER; note = guanosine-3'-phosphate
  modified_base 16: mod_base = OTHER; note = guanosine-3'-phosphate
  modified_base 17: mod_base = OTHER; note = cytidine-3'-phosphate
  modified_base 18: mod_base = OTHER; note = adenosine-3'-phosphate
  modified_base 19: mod_base = OTHER; note = adenosine-3'-phosphate
  misc_feature 1..19: note = RNA
  misc_feature 20..21: note = DNA
tttgtcaagtacaaggcaatt

SEQ ID NO: 2238 - DNA, 21 bp, synthetic construct
  source 1..21: mol_type = other DNA
  modified_base 1: mod_base = OTHER; note = adenosine-3'-phosphate
  modified_base 2: mod_base = OTHER; note = guanosine-3'-phosphate
  modified_base 3: mod_base = OTHER; note = guanosine-3'-phosphate
  modified_base 4: mod_base = OTHER; note = cytidine-3'-phosphate
  modified_base 5: mod_base = OTHER; note = adenosine-3'-phosphate
  modified_base 6: mod_base = OTHER; note = adenosine-3'-phosphate
  modified_base 7: mod_base = OTHER; note = cytidine-3'-phosphate
  modified_base 8: mod_base = OTHER; note = cytidine-3'-phosphate
  modified_base 9: mod_base = OTHER; note = cytidine-3'-phosphate
  modified_base 10: mod_base = OTHER; note = uridine-3'-phosphate
  modified_base 11: mod_base = OTHER; note = uridine-3'-phosphate
  modified_base 12: mod_base = OTHER; note = cytidine-3'-phosphate
  modified_base 13: mod_base = OTHER; note = uridine-3'-phosphate
  modified_base 14: mod_base = OTHER; note = guanosine-3'-phosphate
  modified_base 15: mod_base = OTHER; note = guanosine-3'-phosphate
  modified_base 16: mod_base = OTHER; note = adenosine-3'-phosphate
  modified_base 17: mod_base = OTHER; note = uridine-3'-phosphate
  modified_base 18: mod_base = OTHER; note = adenosine-3'-phosphate
  modified_base 19: mod_base = OTHER; note = uridine-3'-phosphate
  misc_feature 1..19: note = RNA
  misc_feature 20..21: note = DNA
aggcaacccttctggatattt

SEQ ID NO: 2239 - DNA, 21 bp, synthetic construct
  source 1..21: mol_type = other DNA
  modified_base 1: mod_base = OTHER; note = cytidine-3'-phosphate
  modified_base 2: mod_base = OTHER; note = cytidine-3'-phosphate
  modified_base 3: mod_base = OTHER; note = uridine-3'-phosphate
  modified_base 4: mod_base = OTHER; note = uridine-3'-phosphate
  modified_base 5: mod_base = OTHER; note = cytidine-3'-phosphate
  modified_base 6: mod_base = OTHER; note = uridine-3'-phosphate
  modified_base 7: mod_base = OTHER; note = guanosine-3'-phosphate
  modified_base 8: mod_base = OTHER; note = guanosine-3'-phosphate
  modified_base 9: mod_base = OTHER; note = adenosine-3'-phosphate
  modified_base 10: mod_base = OTHER; note = uridine-3'-phosphate
  modified_base 11: mod_base = OTHER; note = adenosine-3'-phosphate
  modified_base 12: mod_base = OTHER; note = uridine-3'-phosphate
  modified_base 13: mod_base = OTHER; note = cytidine-3'-phosphate
  modified_base 14: mod_base = OTHER; note = uridine-3'-phosphate
  modified_base 15: mod_base = OTHER; note = adenosine-3'-phosphate
  modified_base 16: mod_base = OTHER; note = cytidine-3'-phosphate
  modified_base 17: mod_base = OTHER; note = adenosine-3'-phosphate
  modified_base 18: mod_base = OTHER; note = adenosine-3'-phosphate
  modified_base 19: mod_base = OTHER; note = adenosine-3'-phosphate
  misc_feature 1..19: note = RNA
  misc_feature 20..21: note = DNA
ccttctggatatctacaaatt

SEQ ID NO: 2240 - DNA, 21 bp, synthetic construct
  source 1..21: mol_type = other DNA
  modified_base 1: mod_base = OTHER; note = uridine-3'-phosphate
  modified_base 2: mod_base = OTHER; note = adenosine-3'-phosphate
  modified_base 3: mod_base = OTHER; note = uridine-3'-phosphate
  modified_base 4: mod_base = OTHER; note = cytidine-3'-phosphate
  modified_base 5: mod_base = OTHER; note = uridine-3'-phosphate
  modified_base 6: mod_base = OTHER; note = adenosine-3'-phosphate
  modified_base 7: mod_base = OTHER; note = cytidine-3'-phosphate
  modified_base 8: mod_base = OTHER; note = adenosine-3'-phosphate
  modified_base 9: mod_base = OTHER; note = adenosine-3'-phosphate
  modified_base 10: mod_base = OTHER; note = adenosine-3'-phosphate
  modified_base 11: mod_base = OTHER; note = adenosine-3'-phosphate
  modified_base 12: mod_base = OTHER; note = cytidine-3'-phosphate
  modified_base 13: mod_base = OTHER; note = uridine-3'-phosphate
  modified_base 14: mod_base = OTHER; note = guanosine-3'-phosphate
  modified_base 15: mod_base = OTHER; note = guanosine-3'-phosphate
  modified_base 16: mod_base = OTHER; note = guanosine-3'-phosphate
  modified_base 17: mod_base = OTHER; note = guanosine-3'-phosphate
  modified_base 18: mod_base = OTHER; note = adenosine-3'-phosphate
  modified_base 19: mod_base = OTHER; note = adenosine-3'-phosphate
  misc_feature 1..19: note = RNA
  misc_feature 20..21: note = DNA
tatctacaaaactggggaatt

SEQ ID NO: 2241 - DNA, 21 bp, synthetic construct
  source 1..21: mol_type = other DNA
  modified_base 1: mod_base = OTHER; note = cytidine-3'-phosphate
  modified_base 2: mod_base = OTHER; note = uridine-3'-phosphate
  modified_base 3: mod_base = OTHER; note = guanosine-3'-phosphate
  modified_base 4: mod_base = OTHER; note = guanosine-3'-phosphate
  modified_base 5: mod_base = OTHER; note = guanosine-3'-phosphate
  modified_base 6: mod_base = OTHER; note = guanosine-3'-phosphate
  modified_base 7: mod_base = OTHER; note = adenosine-3'-phosphate
  modified_base 8: mod_base = OTHER; note = adenosine-3'-phosphate
  modified_base 9: mod_base = OTHER; note = guanosine-3'-phosphate
  modified_base 10: mod_base = OTHER; note = cytidine-3'-phosphate
  modified_base 11: mod_base = OTHER; note = uridine-3'-phosphate
  modified_base 12: mod_base = OTHER; note = guanosine-3'-phosphate
  modified_base 13: mod_base = OTHER; note = uridine-3'-phosphate
  modified_base 14: mod_base = OTHER; note = uridine-3'-phosphate
  modified_base 15: mod_base = OTHER; note = guanosine-3'-phosphate
  modified_base 16: mod_base = OTHER; note = cytidine-3'-phosphate
  modified_base 17: mod_base = OTHER; note = uridine-3'-phosphate
  modified_base 18: mod_base = OTHER; note = guanosine-3'-phosphate
  modified_base 19: mod_base = OTHER; note = adenosine-3'-phosphate
  misc_feature 1..19: note = RNA
  misc_feature 20..21: note = DNA
ctggggaagctgttgctgatt

SEQ ID NO: 2242 - DNA, 21 bp, synthetic construct
  source 1..21: mol_type = other DNA
  modified_base 1: mod_base = OTHER; note = cytidine-3'-phosphate
  modified_base 2: mod_base = OTHER; note = uridine-3'-phosphate
  modified_base 3: mod_base = OTHER; note = guanosine-3'-phosphate
  modified_base 4: mod_base = OTHER; note = uridine-3'-phosphate
  modified_base 5: mod_base = OTHER; note = uridine-3'-phosphate
  modified_base 6: mod_base = OTHER; note = guanosine-3'-phosphate
  modified_base 7: mod_base = OTHER; note = cytidine-3'-phosphate
  modified_base 8: mod_base = OTHER; note = uridine-3'-phosphate
  modified_base 9: mod_base = OTHER; note = guanosine-3'-phosphate
  modified_base 10: mod_base = OTHER; note = adenosine-3'-phosphate
  modified_base 11: mod_base = OTHER; note = guanosine-3'-phosphate
  modified_base 12: mod_base = OTHER; note = adenosine-3'-phosphate
  modified_base 13: mod_base = OTHER; note = adenosine-3'-phosphate
  modified_base 14: mod_base = OTHER; note = adenosine-3'-phosphate
  modified_base 15: mod_base = OTHER; note = guanosine-3'-phosphate
  modified_base 16: mod_base = OTHER; note = adenosine-3'-phosphate
  modified_base 17: mod_base = OTHER; note = cytidine-3'-phosphate
  modified_base 18: mod_base = OTHER; note = uridine-3'-phosphate
  modified_base 19: mod_base = OTHER; note = cytidine-3'-phosphate
  misc_feature 1..19: note = RNA
  misc_feature 20..21: note = DNA
ctgttgctgagaaagactctt

SEQ ID NO: 2243 - DNA, 21 bp, synthetic construct
  source 1..21: mol_type = other DNA
  modified_base 1: mod_base = OTHER; note = guanosine-3'-phosphate
  modified_base 2: mod_base = OTHER; note = adenosine-3'-phosphate
  modified_base 3: mod_base = OTHER; note = cytidine-3'-phosphate
  modified_base 4: mod_base = OTHER; note = uridine-3'-phosphate
  modified_base 5: mod_base = OTHER; note = cytidine-3'-phosphate
  modified_base 6: mod_base = OTHER; note = uridine-3'-phosphate
  modified_base 7: mod_base = OTHER; note = guanosine-3'-phosphate
  modified_base 8: mod_base = OTHER; note = adenosine-3'-phosphate
  modified_base 9: mod_base = OTHER; note = guanosine-3'-phosphate
  modified_base 10: mod_base = OTHER; note = adenosine-3'-phosphate
  modified_base 11: mod_base = OTHER; note = uridine-3'-phosphate
  modified_base 12: mod_base = OTHER; note = uridine-3'-phosphate
  modified_base 13: mod_base = OTHER; note = adenosine-3'-phosphate
  modified_base 14: mod_base = OTHER; note = cytidine-3'-phosphate
  modified_base 15: mod_base = OTHER; note = cytidine-3'-phosphate
  modified_base 16: mod_base = OTHER; note = uridine-3'-phosphate
  modified_base 17: mod_base = OTHER; note = uridine-3'-phosphate
  modified_base 18: mod_base = OTHER; note = cytidine-3'-phosphate
  modified_base 19: mod_base = OTHER; note = adenosine-3'-phosphate
  misc_feature 1..19: note = RNA
  misc_feature 20..21: note = DNA
gactctgagattaccttcatt

SEQ ID NO: 2244 - DNA, 21 bp, synthetic construct
  source 1..21: mol_type = other DNA
  modified_base 1: mod_base = OTHER; note = guanosine-3'-phosphate
  modified_base 2: mod_base = OTHER; note = adenosine-3'-phosphate
  modified_base 3: mod_base = OTHER; note = guanosine-3'-phosphate
  modified_base 4: mod_base = OTHER; note = adenosine-3'-phosphate
  modified_base 5: mod_base = OTHER; note = uridine-3'-phosphate
  modified_base 6: mod_base = OTHER; note = uridine-3'-phosphate
  modified_base 7: mod_base = OTHER; note = adenosine-3'-phosphate
  modified_base 8: mod_base = OTHER; note = cytidine-3'-phosphate
  modified_base 9: mod_base = OTHER; note = cytidine-3'-phosphate
  modified_base 10: mod_base = OTHER; note = uridine-3'-phosphate
  modified_base 11: mod_base = OTHER; note = uridine-3'-phosphate
  modified_base 12: mod_base = OTHER; note = cytidine-3'-phosphate
  modified_base 13: mod_base = OTHER; note = adenosine-3'-phosphate
  modified_base 14: mod_base = OTHER; note = uridine-3'-phosphate
  modified_base 15: mod_base = OTHER; note = uridine-3'-phosphate
  modified_base 16: mod_base = OTHER; note = adenosine-3'-phosphate
  modified_base 17: mod_base = OTHER; note = adenosine-3'-phosphate
  modified_base 18: mod_base = OTHER; note = adenosine-3'-phosphate
  modified_base 19: mod_base = OTHER; note = adenosine-3'-phosphate
  misc_feature 1..19: note = RNA
  misc_feature 20..21: note = DNA
gagattaccttcattaaaatt

SEQ ID NO: 2245 - DNA, 21 bp, synthetic construct
  source 1..21: mol_type = other DNA
  modified_base 1: mod_base = OTHER; note = adenosine-3'-phosphate
  modified_base 2: mod_base = OTHER; note = uridine-3'-phosphate
  modified_base 3: mod_base = OTHER; note = uridine-3'-phosphate
  modified_base 4: mod_base = OTHER; note = adenosine-3'-phosphate
  modified_base 5: mod_base = OTHER; note = adenosine-3'-phosphate
  modified_base 6: mod_base = OTHER; note = adenosine-3'-phosphate
  modified_base 7: mod_base = OTHER; note = adenosine-3'-phosphate
  modified_base 8: mod_base = OTHER; note = adenosine-3'-phosphate
  modified_base 9: mod_base = OTHER; note = guanosine-3'-phosphate
  modified_base 10: mod_base = OTHER; note = guanosine-3'-phosphate
  modified_base 11: mod_base = OTHER; note = uridine-3'-phosphate
  modified_base 12: mod_base = OTHER; note = adenosine-3'-phosphate
  modified_base 13: mod_base = OTHER; note = adenosine-3'-phosphate
  modified_base 14: mod_base = OTHER; note = cytidine-3'-phosphate
  modified_base 15: mod_base = OTHER; note = cytidine-3'-phosphate
  modified_base 16: mod_base = OTHER; note = uridine-3'-phosphate
  modified_base 17: mod_base = OTHER; note = guanosine-3'-phosphate
  modified_base 18: mod_base = OTHER; note = uridine-3'-phosphate
  modified_base 19: mod_base = OTHER; note = adenosine-3'-phosphate
  misc_feature 1..19: note = RNA
  misc_feature 20..21: note = DNA
attaaaaaggtaacctgtatt

SEQ ID NO: 2246 - DNA, 21 bp, synthetic construct
  source 1..21: mol_type = other DNA
  modified_base 1: mod_base = OTHER; note = uridine-3'-phosphate
  modified_base 2: mod_base = OTHER; note = adenosine-3'-phosphate
  modified_base 3: mod_base = OTHER; note = adenosine-3'-phosphate
  modified_base 4: mod_base = OTHER; note = cytidine-3'-phosphate
  modified_base 5: mod_base = OTHER; note = cytidine-3'-phosphate
  modified_base 6: mod_base = OTHER; note = uridine-3'-phosphate
  modified_base 7: mod_base = OTHER; note = guanosine-3'-phosphate
  modified_base 8: mod_base = OTHER; note = uridine-3'-phosphate
  modified_base 9: mod_base = OTHER; note = adenosine-3'-phosphate
  modified_base 10: mod_base = OTHER; note = cytidine-3'-phosphate
  modified_base 11: mod_base = OTHER; note = uridine-3'-phosphate
  modified_base 12: mod_base = OTHER; note = adenosine-3'-phosphate
  modified_base 13: mod_base = OTHER; note = adenosine-3'-phosphate
  modified_base 14: mod_base = OTHER; note = cytidine-3'-phosphate
  modified_base 15: mod_base = OTHER; note = guanosine-3'-phosphate
  modified_base 16: mod_base = OTHER; note = cytidine-3'-phosphate
  modified_base 17: mod_base = OTHER; note = uridine-3'-phosphate
  modified_base 18: mod_base = OTHER; note = guanosine-3'-phosphate
  modified_base 19: mod_base = OTHER; note = adenosine-3'-phosphate
  misc_feature 1..19: note = RNA
  misc_feature 20..21: note = DNA
taacctgtactaacgctgatt

SEQ ID NO: 2247 - DNA, 21 bp, synthetic construct
  source 1..21: mol_type = other DNA
  modified_base 1: mod_base = OTHER; note = cytidine-3'-phosphate
  modified_base 2: mod_base = OTHER; note = uridine-3'-phosphate
  modified_base 3: mod_base = OTHER; note = adenosine-3'-phosphate
  modified_base 4: mod_base = OTHER; note = adenosine-3'-phosphate
  modified_base 5: mod_base = OTHER; note = cytidine-3'-phosphate
  modified_base 6: mod_base = OTHER; note = guanosine-3'-phosphate
  modified_base 7: mod_base = OTHER; note = cytidine-3'-phosphate
  modified_base 8: mod_base = OTHER; note = uridine-3'-phosphate
  modified_base 9: mod_base = OTHER; note = guanosine-3'-phosphate
  modified_base 10: mod_base = OTHER; note = adenosine-3'-phosphate
  modified_base 11: mod_base = OTHER; note = guanosine-3'-phosphate
  modified_base 12: mod_base = OTHER; note = cytidine-3'-phosphate
  modified_base 13: mod_base = OTHER; note = uridine-3'-phosphate
  modified_base 14: mod_base = OTHER; note = guanosine-3'-phosphate
  modified_base 15: mod_base = OTHER; note = guanosine-3'-phosphate
  modified_base 16: mod_base = OTHER; note = uridine-3'-phosphate
  modified_base 17: mod_base = OTHER; note = adenosine-3'-phosphate
  modified_base 18: mod_base = OTHER; note = adenosine-3'-phosphate
  modified_base 19: mod_base = OTHER; note = adenosine-3'-phosphate
  misc_feature 1..19: note = RNA
  misc_feature 20..21: note = DNA
ctaacgctgagctggtaaatt

SEQ ID NO: 2248 - DNA, 21 bp, synthetic construct
  source 1..21: mol_type = other DNA
  modified_base 1: mod_base = OTHER; note = guanosine-3'-phosphate
  modified_base 2: mod_base = OTHER; note = guanosine-3'-phosphate
  modified_base 3: mod_base = OTHER; note = uridine-3'-phosphate
  modified_base 4: mod_base = OTHER; note = adenosine-3'-phosphate
  modified_base 5: mod_base = OTHER; note = adenosine-3'-phosphate
  modified_base 6: mod_base = OTHER; note = adenosine-3'-phosphate
  modified_base 7: mod_base = OTHER; note = adenosine-3'-phosphate
  modified_base 8: mod_base = OTHER; note = guanosine-3'-phosphate
  modified_base 9: mod_base = OTHER; note = guanosine-3'-phosphate
  modified_base 10: mod_base = OTHER; note = adenosine-3'-phosphate
  modified_base 11: mod_base = OTHER; note = adenosine-3'-phosphate
  modified_base 12: mod_base = OTHER; note = guanosine-3'-phosphate
  modified_base 13: mod_base = OTHER; note = adenosine-3'-phosphate
  modified_base 14: mod_base = OTHER; note = cytidine-3'-phosphate
  modified_base 15: mod_base = OTHER; note = adenosine-3'-phosphate
  modified_base 16: mod_base = OTHER; note = guanosine-3'-phosphate
  modified_base 17: mod_base = OTHER; note = uridine-3'-phosphate
  modified_base 18: mod_base = OTHER; note = adenosine-3'-phosphate
  modified_base 19: mod_base = OTHER; note = cytidine-3'-phosphate
  misc_feature 1..19: note = RNA
  misc_feature 20..21: note = DNA
ggtaaaaggaagacagtactt

SEQ ID NO: 2249 - DNA, 21 bp, synthetic construct
  source 1..21: mol_type = other DNA
  modified_base 1: mod_base = OTHER; note = guanosine-3'-phosphate
  modified_base 2: mod_base = OTHER; note = adenosine-3'-phosphate
  modified_base 3: mod_base = OTHER; note = adenosine-3'-phosphate
  modified_base 4: mod_base = OTHER; note = guanosine-3'-phosphate
  modified_base 5: mod_base = OTHER; note = adenosine-3'-phosphate
  modified_base 6: mod_base = OTHER; note = cytidine-3'-phosphate
  modified_base 7: mod_base = OTHER; note = adenosine-3'-phosphate
  modified_base 8: mod_base = OTHER; note = guanosine-3'-phosphate
  modified_base 9: mod_base = OTHER; note = uridine-3'-phosphate
  modified_base 10: mod_base = OTHER; note = adenosine-3'-phosphate
  modified_base 11: mod_base = OTHER; note = cytidine-3'-phosphate
  modified_base 12: mod_base = OTHER; note = uridine-3'-phosphate
  modified_base 13: mod_base = OTHER; note = uridine-3'-phosphate
  modified_base 14: mod_base = OTHER; note = adenosine-3'-phosphate
  modified_base 15: mod_base = OTHER; note = adenosine-3'-phosphate
  modified_base 16: mod_base = OTHER; note = uridine-3'-phosphate
  modified_base 17: mod_base = OTHER; note = uridine-3'-phosphate
  modified_base 18: mod_base = OTHER; note = adenosine-3'-phosphate
  modified_base 19: mod_base = OTHER; note = uridine-3'-phosphate
  misc_feature 1..19: note = RNA
  misc_feature 20..21: note = DNA
gaagacagtacttaattattt

SEQ ID NO: 2250 - DNA, 21 bp, synthetic construct
  source 1..21: mol_type = other DNA
  modified_base 1: mod_base = OTHER; note = cytidine-3'-phosphate
  modified_base 2: mod_base = OTHER; note = uridine-3'-phosphate
  modified_base 3: mod_base = OTHER; note = uridine-3'-phosphate
  modified_base 4: mod_base = OTHER; note = adenosine-3'-phosphate
  modified_base 5: mod_base = OTHER; note = adenosine-3'-phosphate
  modified_base 6: mod_base = OTHER; note = uridine-3'-phosphate
  modified_base 7: mod_base = OTHER; note = uridine-3'-phosphate
  modified_base 8: mod_base = OTHER; note = adenosine-3'-phosphate
  modified_base 9: mod_base = OTHER; note = uridine-3'-phosphate
  modified_base 10: mod_base = OTHER; note = guanosine-3'-phosphate
  modified_base 11: mod_base = OTHER; note = guanosine-3'-phosphate
  modified_base 12: mod_base = OTHER; note = guanosine-3'-phosphate
  modified_base 13: mod_base = OTHER; note = uridine-3'-phosphate
  modified_base 14: mod_base = OTHER; note = adenosine-3'-phosphate
  modified_base 15: mod_base = OTHER; note = adenosine-3'-phosphate
  modified_base 16: mod_base = OTHER; note = adenosine-3'-phosphate
  modified_base 17: mod_base = OTHER; note = guanosine-3'-phosphate
  modified_base 18: mod_base = OTHER; note = adenosine-3'-phosphate
  modified_base 19: mod_base = OTHER; note = adenosine-3'-phosphate
  misc_feature 1..19: note = RNA
  misc_feature 20..21: note = DNA
cttaattatgggtaaagaatt

SEQ ID NO: 2251 - DNA, 21 bp, synthetic construct
  source 1..21: mol_type = other DNA
  modified_base 1: mod_base = OTHER; note = uridine-3'-phosphate
  modified_base 2: mod_base = OTHER; note = adenosine-3'-phosphate
  modified_base 3: mod_base = OTHER; note = adenosine-3'-phosphate
  modified_base 4: mod_base = OTHER; note = adenosine-3'-phosphate
  modified_base 5: mod_base = OTHER; note = guanosine-3'-phosphate
  modified_base 6: mod_base = OTHER; note = adenosine-3'-phosphate
  modified_base 7: mod_base = OTHER; note = adenosine-3'-phosphate
  modified_base 8: mod_base = OTHER; note = guanosine-3'-phosphate
  modified_base 9: mod_base = OTHER; note = cytidine-3'-phosphate
  modified_base 10: mod_base = OTHER; note = cytidine-3'-phosphate
  modified_base 11: mod_base = OTHER; note = cytidine-3'-phosphate
  modified_base 12: mod_base = OTHER; note = uridine-3'-phosphate
  modified_base 13: mod_base = OTHER; note = cytidine-3'-phosphate
  modified_base 14: mod_base = OTHER; note = cytidine-3'-phosphate
  modified_base 15: mod_base = OTHER; note = adenosine-3'-phosphate
  modified_base 16: mod_base = OTHER; note = guanosine-3'-phosphate
  modified_base 17: mod_base = OTHER; note = adenosine-3'-phosphate
  modified_base 18: mod_base = OTHER; note = uridine-3'-phosphate
  modified_base 19: mod_base = OTHER; note = adenosine-3'-phosphate
  misc_feature 1..19: note = RNA
  misc_feature 20..21: note = DNA
taaagaagccctccagatatt

SEQ ID NO: 2252 - DNA, 21 bp, synthetic construct
  source 1..21: mol_type = other DNA
  modified_base 1: mod_base = OTHER; note = cytidine-3'-phosphate
  modified_base 2: mod_base = OTHER; note = cytidine-3'-phosphate
  modified_base 3: mod_base = OTHER; note = uridine-3'-phosphate
  modified_base 4: mod_base = OTHER; note = cytidine-3'-phosphate
  modified_base 5: mod_base = OTHER; note = cytidine-3'-phosphate
  modified_base 6: mod_base = OTHER; note = adenosine-3'-phosphate
  modified_base 7: mod_base = OTHER; note = guanosine-3'-phosphate
  modified_base 8: mod_base = OTHER; note = adenosine-3'-phosphate
  modified_base 9: mod_base = OTHER; note = uridine-3'-phosphate
  modified_base 10: mod_base = OTHER; note = adenosine-3'-phosphate
  modified_base 11: mod_base = OTHER; note = adenosine-3'-phosphate
  modified_base 12: mod_base = OTHER; note = adenosine-3'-phosphate
  modified_base 13: mod_base = OTHER; note = adenosine-3'-phosphate
  modified_base 14: mod_base = OTHER; note = uridine-3'-phosphate
  modified_base 15: mod_base = OTHER; note = adenosine-3'-phosphate
  modified_base 16: mod_base = OTHER; note = cytidine-3'-phosphate
  modified_base 17: mod_base = OTHER; note = adenosine-3'-phosphate
  modified_base 18: mod_base = OTHER; note = adenosine-3'-phosphate
  modified_base 19: mod_base = OTHER; note = uridine-3'-phosphate
  misc_feature 1..19: note = RNA
  misc_feature 20..21: note = DNA
cctccagataaaatacaattt

SEQ ID NO: 2253 - DNA, 21 bp, synthetic construct
  source 1..21: mol_type = other DNA
  modified_base 1: mod_base = OTHER; note = adenosine-3'-phosphate
  modified_base 2: mod_base = OTHER; note = adenosine-3'-phosphate
  modified_base 3: mod_base = OTHER; note = adenosine-3'-phosphate
  modified_base 4: mod_base = OTHER; note = uridine-3'-phosphate
  modified_base 5: mod_base = OTHER; note = adenosine-3'-phosphate
  modified_base 6: mod_base = OTHER; note = cytidine-3'-phosphate
  modified_base 7: mod_base = OTHER; note = adenosine-3'-phosphate
  modified_base 8: mod_base = OTHER; note = adenosine-3'-phosphate
  modified_base 9: mod_base = OTHER; note = uridine-3'-phosphate
  modified_base 10: mod_base = OTHER; note = uridine-3'-phosphate
  modified_base 11: mod_base = OTHER; note = uridine-3'-phosphate
  modified_base 12: mod_base = OTHER; note = cytidine-3'-phosphate
  modified_base 13: mod_base = OTHER; note = adenosine-3'-phosphate
  modified_base 14: mod_base = OTHER; note = guanosine-3'-phosphate
  modified_base 15: mod_base = OTHER; note = uridine-3'-phosphate
  modified_base 16: mod_base = OTHER; note = uridine-3'-phosphate
  modified_base 17: mod_base = OTHER; note = uridine-3'-phosphate
  modified_base 18: mod_base = OTHER; note = cytidine-3'-phosphate
  modified_base 19: mod_base = OTHER; note = adenosine-3'-phosphate
  misc_feature 1..19: note = RNA
  misc_feature 20..21: note = DNA
aaatacaatttcagtttcatt

SEQ ID NO: 2254 - DNA, 21 bp, synthetic construct
  source 1..21: mol_type = other DNA
  modified_base 1: mod_base = OTHER; note = cytidine-3'-phosphate
  modified_base 2: mod_base = OTHER; note = adenosine-3'-phosphate
  modified_base 3: mod_base = OTHER; note = guanosine-3'-phosphate
  modified_base 4: mod_base = OTHER; note = uridine-3'-phosphate
  modified_base 5: mod_base = OTHER; note = uridine-3'-phosphate
  modified_base 6: mod_base = OTHER; note = uridine-3'-phosphate
  modified_base 7: mod_base = OTHER; note = cytidine-3'-phosphate
  modified_base 8: mod_base = OTHER; note = adenosine-3'-phosphate
  modified_base 9: mod_base = OTHER; note = guanosine-3'-phosphate
  modified_base 10: mod_base = OTHER; note = guanosine-3'-phosphate
  modified_base 11: mod_base = OTHER; note = uridine-3'-phosphate
  modified_base 12: mod_base = OTHER; note = adenosine-3'-phosphate
  modified_base 13: mod_base = OTHER; note = cytidine-3'-phosphate
  modified_base 14: mod_base = OTHER; note = adenosine-3'-phosphate
  modified_base 15: mod_base = OTHER; note = uridine-3'-phosphate
  modified_base 16: mod_base = OTHER; note = cytidine-3'-phosphate
  modified_base 17: mod_base = OTHER; note = uridine-3'-phosphate
  modified_base 18: mod_base = OTHER; note = adenosine-3'-phosphate
  modified_base 19: mod_base = OTHER; note = cytidine-3'-phosphate
  misc_feature 1..19: note = RNA
  misc_feature 20..21: note = DNA
cagtttcaggtacatctactt

SEQ ID NO: 2255 - DNA, 21 bp, synthetic construct
  source 1..21: mol_type = other DNA
  modified_base 1: mod_base = OTHER; note = guanosine-3'-phosphate
  modified_base 2: mod_base = OTHER; note = guanosine-3'-phosphate
  modified_base 3: mod_base = OTHER; note = uridine-3'-phosphate
  modified_base 4: mod_base = OTHER; note = adenosine-3'-phosphate
  modified_base 5: mod_base = OTHER; note = cytidine-3'-phosphate
  modified_base 6: mod_base = OTHER; note = adenosine-3'-phosphate
  modified_base 7: mod_base = OTHER; note = uridine-3'-phosphate
  modified_base 8: mod_base = OTHER; note = cytidine-3'-phosphate
  modified_base 9: mod_base = OTHER; note = uridine-3'-phosphate
  modified_base 10: mod_base = OTHER; note = adenosine-3'-phosphate
  modified_base 11: mod_base = OTHER; note = cytidine-3'-phosphate
  modified_base 12: mod_base = OTHER; note = cytidine-3'-phosphate
  modified_base 13: mod_base = OTHER; note = cytidine-3'-phosphate
  modified_base 14: mod_base = OTHER; note = uridine-3'-phosphate
  modified_base 15: mod_base = OTHER; note = uridine-3'-phosphate
  modified_base 16: mod_base = OTHER; note = uridine-3'-phosphate
  modified_base 17: mod_base = OTHER; note = adenosine-3'-phosphate
  modified_base 18: mod_base = OTHER; note = guanosine-3'-phosphate
  modified_base 19: mod_base = OTHER; note = adenosine-3'-phosphate
  misc_feature 1..19: note = RNA
  misc_feature 20..21: note = DNA
ggtacatctaccctttagatt

SEQ ID NO: 2256 - DNA, 21 bp, synthetic construct
  source 1..21: mol_type = other DNA
  modified_base 1: mod_base = OTHER; note = cytidine-3'-phosphate
  modified_base 2: mod_base = OTHER; note = cytidine-3'-phosphate
  modified_base 3: mod_base = OTHER; note = uridine-3'-phosphate
  modified_base 4: mod_base = OTHER; note = uridine-3'-phosphate
  modified_base 5: mod_base = OTHER; note = uridine-3'-phosphate
  modified_base 6: mod_base = OTHER; note = adenosine-3'-phosphate
  modified_base 7: mod_base = OTHER; note = guanosine-3'-phosphate
  modified_base 8: mod_base = OTHER; note = adenosine-3'-phosphate
  modified_base 9: mod_base = OTHER; note = uridine-3'-phosphate
  modified_base 10: mod_base = OTHER; note = uridine-3'-phosphate
  modified_base 11: mod_base = OTHER; note = cytidine-3'-phosphate
  modified_base 12: mod_base = OTHER; note = cytidine-3'-phosphate
  modified_base 13: mod_base = OTHER; note = uridine-3'-phosphate
  modified_base 14: mod_base = OTHER; note = uridine-3'-phosphate
  modified_base 15: mod_base = OTHER; note = guanosine-3'-phosphate
  modified_base 16: mod_base = OTHER; note = adenosine-3'-phosphate
  modified_base 17: mod_base = OTHER; note = cytidine-3'-phosphate
  modified_base 18: mod_base = OTHER; note = cytidine-3'-phosphate
  modified_base 19: mod_base = OTHER; note = uridine-3'-phosphate
  misc_feature 1..19: note = RNA
  misc_feature 20..21: note = DNA
cctttagattccttgaccttt

SEQ ID NO: 2257 - DNA, 21 bp, synthetic construct
  source 1..21: mol_type = other DNA
  modified_base 1: mod_base = OTHER; note = cytidine-3'-phosphate
  modified_base 2: mod_base = OTHER; note = cytidine-3'-phosphate
  modified_base 3: mod_base = OTHER; note = uridine-3'-phosphate
  modified_base 4: mod_base = OTHER; note = uridine-3'-phosphate
  modified_base 5: mod_base = OTHER; note = guanosine-3'-phosphate
  modified_base 6: mod_base = OTHER; note = adenosine-3'-phosphate
  modified_base 7: mod_base = OTHER; note = cytidine-3'-phosphate
  modified_base 8: mod_base = OTHER; note = cytidine-3'-phosphate
  modified_base 9: mod_base = OTHER; note = uridine-3'-phosphate
  modified_base 10: mod_base = OTHER; note = guanosine-3'-phosphate
  modified_base 11: mod_base = OTHER; note = guanosine-3'-phosphate
  modified_base 12: mod_base = OTHER; note = adenosine-3'-phosphate
  modified_base 13: mod_base = OTHER; note = uridine-3'-phosphate
  modified_base 14: mod_base = OTHER; note = uridine-3'-phosphate
  modified_base 15: mod_base = OTHER; note = guanosine-3'-phosphate
  modified_base 16: mod_base = OTHER; note = adenosine-3'-phosphate
  modified_base 17: mod_base = OTHER; note = adenosine-3'-phosphate
  modified_base 18: mod_base = OTHER; note = uridine-3'-phosphate
  modified_base 19: mod_base = OTHER; note = adenosine-3'-phosphate
  misc_feature 1..19: note = RNA
  misc_feature 20..21: note = DNA
ccttgacctggattgaatatt

SEQ ID NO: 2258 - DNA, 21 bp, synthetic construct
  source 1..21: mol_type = other DNA
  modified_base 1: mod_base = OTHER; note = guanosine-3'-phosphate
  modified_base 2: mod_base = OTHER; note = guanosine-3'-phosphate
  modified_base 3: mod_base = OTHER; note = adenosine-3'-phosphate
  modified_base 4: mod_base = OTHER; note = uridine-3'-phosphate
  modified_base 5: mod_base = OTHER; note = uridine-3'-phosphate
  modified_base 6: mod_base = OTHER; note = guanosine-3'-phosphate
  modified_base 7: mod_base = OTHER; note = adenosine-3'-phosphate
  modified_base 8: mod_base = OTHER; note = adenosine-3'-phosphate
  modified_base 9: mod_base = OTHER; note = uridine-3'-phosphate
  modified_base 10: mod_base = OTHER; note = adenosine-3'-phosphate
  modified_base 11: mod_base = OTHER; note = cytidine-3'-phosphate
  modified_base 12: mod_base = OTHER; note = uridine-3'-phosphate
  modified_base 13: mod_base = OTHER; note = guanosine-3'-phosphate
  modified_base 14: mod_base = OTHER; note = guanosine-3'-phosphate
  modified_base 15: mod_base = OTHER; note = cytidine-3'-phosphate
  modified_base 16: mod_base = OTHER; note = cytidine-3'-phosphate
  modified_base 17: mod_base = OTHER; note = uridine-3'-phosphate
  modified_base 18: mod_base = OTHER; note = adenosine-3'-phosphate
  modified_base 19: mod_base = OTHER; note = guanosine-3'-phosphate
  misc_feature 1..19: note = RNA
  misc_feature 20..21: note = DNA
ggattgaatactggcctagtt

SEQ ID NO: 2259 - DNA, 21 bp, synthetic construct
  source 1..21: mol_type = other DNA
  modified_base 1: mod_base = OTHER; note = cytidine-3'-phosphate
  modified_base 2: mod_base = OTHER; note = uridine-3'-phosphate
  modified_base 3: mod_base = OTHER; note = guanosine-3'-phosphate
  modified_base 4: mod_base = OTHER; note = guanosine-3'-phosphate
  modified_base 5: mod_base = OTHER; note = cytidine-3'-phosphate
  modified_base 6: mod_base = OTHER; note = cytidine-3'-phosphate
  modified_base 7: mod_base = OTHER; note = uridine-3'-phosphate
  modified_base 8: mod_base = OTHER; note = adenosine-3'-phosphate
  modified_base 9: mod_base = OTHER; note = guanosine-3'-phosphate
  modified_base 10: mod_base = OTHER; note = adenosine-3'-phosphate
  modified_base 11: mod_base = OTHER; note = guanosine-3'-phosphate
  modified_base 12: mod_base = OTHER; note = adenosine-3'-phosphate
  modified_base 13: mod_base = OTHER; note = cytidine-3'-phosphate
  modified_base 14: mod_base = OTHER; note = adenosine-3'-phosphate
  modified_base 15: mod_base = OTHER; note = cytidine-3'-phosphate
  modified_base 16: mod_base = OTHER; note = adenosine-3'-phosphate
  modified_base 17: mod_base = OTHER; note = adenosine-3'-phosphate
  modified_base 18: mod_base = OTHER; note = cytidine-3'-phosphate
  modified_base 19: mod_base = OTHER; note = adenosine-3'-phosphate
  misc_feature 1..19: note = RNA
  misc_feature 20..21: note = DNA
ctggcctagagacacaacatt

SEQ ID NO: 2260 - DNA, 21 bp, synthetic construct
  source 1..21: mol_type = other DNA
  modified_base 1: mod_base = OTHER; note = guanosine-3'-phosphate
  modified_base 2: mod_base = OTHER; note = adenosine-3'-phosphate
  modified_base 3: mod_base = OTHER; note = guanosine-3'-phosphate
  modified_base 4: mod_base = OTHER; note = adenosine-3'-phosphate
  modified_base 5: mod_base = OTHER; note = cytidine-3'-phosphate
  modified_base 6: mod_base = OTHER; note = adenosine-3'-phosphate
  modified_base 7: mod_base = OTHER; note = cytidine-3'-phosphate
  modified_base 8: mod_base = OTHER; note = adenosine-3'-phosphate
  modified_base 9: mod_base = OTHER; note = adenosine-3'-phosphate
  modified_base 10: mod_base = OTHER; note = cytidine-3'-phosphate
  modified_base 11: mod_base = OTHER; note = adenosine-3'-phosphate
  modified_base 12: mod_base = OTHER; note = uridine-3'-phosphate
  modified_base 13: mod_base = OTHER; note = guanosine-3'-phosphate
  modified_base 14: mod_base = OTHER; note = uridine-3'-phosphate
  modified_base 15: mod_base = OTHER; note = uridine-3'-phosphate
  modified_base 16: mod_base = OTHER; note = cytidine-3'-phosphate
  modified_base 17: mod_base = OTHER; note = adenosine-3'-phosphate
  modified_base 18: mod_base = OTHER; note = uridine-3'-phosphate
  modified_base 19: mod_base = OTHER; note = cytidine-3'-phosphate
  misc_feature 1..19: note = RNA
  misc_feature 20..21: note = DNA
gagacacaacatgttcatctt

SEQ ID NO: 2261 - DNA, 21 bp, synthetic construct
  source 1..21: mol_type = other DNA
  modified_base 1: mod_base = OTHER; note = guanosine-3'-phosphate
  modified_base 2: mod_base = OTHER; note = uridine-3'-phosphate
  modified_base 3: mod_base = OTHER; note = uridine-3'-phosphate
  modified_base 4: mod_base = OTHER; note = cytidine-3'-phosphate
  modified_base 5: mod_base = OTHER; note = adenosine-3'-phosphate
  modified_base 6: mod_base = OTHER; note = uridine-3'-phosphate
  modified_base 7: mod_base = OTHER; note = cytidine-3'-phosphate
  modified_base 8: mod_base = OTHER; note = guanosine-3'-phosphate
  modified_base 9: mod_base = OTHER; note = uridine-3'-phosphate
  modified_base 10: mod_base = OTHER; note = guanosine-3'-phosphate
  modified_base 11: mod_base = OTHER; note = uridine-3'-phosphate
  modified_base 12: mod_base = OTHER; note = cytidine-3'-phosphate
  modified_base 13: mod_base = OTHER; note = adenosine-3'-phosphate
  modified_base 14: mod_base = OTHER; note = adenosine-3'-phosphate
  modified_base 15: mod_base = OTHER; note = guanosine-3'-phosphate
  modified_base 16: mod_base = OTHER; note = cytidine-3'-phosphate
  modified_base 17: mod_base = OTHER; note = adenosine-3'-phosphate
  modified_base 18: mod_base = OTHER; note = uridine-3'-phosphate
  modified_base 19: mod_base = OTHER; note = uridine-3'-phosphate
  misc_feature 1..19: note = RNA
  misc_feature 20..21: note = DNA
gttcatcgtgtcaagcatttt

SEQ ID NO: 2262 - DNA, 21 bp, synthetic construct
  source 1..21: mol_type = other DNA
  modified_base 1: mod_base = OTHER; note = guanosine-3'-phosphate
  modified_base 2: mod_base = OTHER; note = uridine-3'-phosphate
  modified_base 3: mod_base = OTHER; note = cytidine-3'-phosphate
  modified_base 4: mod_base = OTHER; note = adenosine-3'-phosphate
  modified_base 5: mod_base = OTHER; note = adenosine-3'-phosphate
  modified_base 6: mod_base = OTHER; note = guanosine-3'-phosphate
  modified_base 7: mod_base = OTHER; note = cytidine-3'-phosphate
  modified_base 8: mod_base = OTHER; note = adenosine-3'-phosphate
  modified_base 9: mod_base = OTHER; note = uridine-3'-phosphate
  modified_base 10: mod_base = OTHER; note = uridine-3'-phosphate
  modified_base 11: mod_base = OTHER; note = uridine-3'-phosphate
  modified_base 12: mod_base = OTHER; note = uridine-3'-phosphate
  modified_base 13: mod_base = OTHER; note = uridine-3'-phosphate
  modified_base 14: mod_base = OTHER; note = adenosine-3'-phosphate
  modified_base 15: mod_base = OTHER; note = guanosine-3'-phosphate
  modified_base 16: mod_base = OTHER; note = cytidine-3'-phosphate
  modified_base 17: mod_base = OTHER; note = uridine-3'-phosphate
  modified_base 18: mod_base = OTHER; note = adenosine-3'-phosphate
  modified_base 19: mod_base = OTHER; note = adenosine-3'-phosphate
  misc_feature 1..19: note = RNA
  misc_feature 20..21: note = DNA
gtcaagcatttttagctaatt

SEQ ID NO: 2263 - DNA, 21 bp, synthetic construct
  source 1..21: mol_type = other DNA
  modified_base 1: mod_base = OTHER; note = adenosine-3'-phosphate
  modified_base 2: mod_base = OTHER; note = guanosine-3'-phosphate
  modified_base 3: mod_base = OTHER; note = cytidine-3'-phosphate
  modified_base 4: mod_base = OTHER; note = uridine-3'-phosphate
  modified_base 5: mod_base = OTHER; note = adenosine-3'-phosphate
  modified_base 6: mod_base = OTHER; note = adenosine-3'-phosphate
  modified_base 7: mod_base = OTHER; note = uridine-3'-phosphate
  modified_base 8: mod_base = OTHER; note = uridine-3'-phosphate
  modified_base 9: mod_base = OTHER; note = uridine-3'-phosphate
  modified_base 10: mod_base = OTHER; note = adenosine-3'-phosphate
  modified_base 11: mod_base = OTHER; note = guanosine-3'-phosphate
  modified_base 12: mod_base = OTHER; note = adenosine-3'-phosphate
  modified_base 13: mod_base = OTHER; note = uridine-3'-phosphate
  modified_base 14: mod_base = OTHER; note = guanosine-3'-phosphate
  modified_base 15: mod_base = OTHER; note = adenosine-3'-phosphate
  modified_base 16: mod_base = OTHER; note = adenosine-3'-phosphate
  modified_base 17: mod_base = OTHER; note = uridine-3'-phosphate
  modified_base 18: mod_base = OTHER; note = uridine-3'-phosphate
  modified_base 19: mod_base = OTHER; note = uridine-3'-phosphate
  misc_feature 1..19: note = RNA
  misc_feature 20..21: note = DNA
agctaatttagatgaattttt

SEQ ID NO: 2264 - DNA, 21 bp, synthetic construct
  source 1..21: mol_type = other DNA
  modified_base 1: mod_base = OTHER; note = adenosine-3'-phosphate
  modified_base 2: mod_base = OTHER; note = guanosine-3'-phosphate
  modified_base 3: mod_base = OTHER; note = adenosine-3'-phosphate
  modified_base 4: mod_base = OTHER; note = uridine-3'-phosphate
  modified_base 5: mod_base = OTHER; note = guanosine-3'-phosphate
  modified_base 6: mod_base = OTHER; note = adenosine-3'-phosphate
  modified_base 7: mod_base = OTHER; note = adenosine-3'-phosphate
  modified_base 8: mod_base = OTHER; note = uridine-3'-phosphate
  modified_base 9: mod_base = OTHER; note = uridine-3'-phosphate
  modified_base 10: mod_base = OTHER; note = uridine-3'-phosphate
  modified_base 11: mod_base = OTHER; note = guanosine-3'-phosphate
  modified_base 12: mod_base = OTHER; note = cytidine-3'-phosphate
  modified_base 13: mod_base = OTHER; note = cytidine-3'-phosphate
  modified_base 14: mod_base = OTHER; note = guanosine-3'-phosphate
  modified_base 15: mod_base = OTHER; note = adenosine-3'-phosphate
  modified_base 16: mod_base = OTHER; note = adenosine-3'-phosphate
  modified_base 17: mod_base = OTHER; note = guanosine-3'-phosphate
  modified_base 18: mod_base = OTHER; note = adenosine-3'-phosphate
  modified_base 19: mod_base = OTHER; note = uridine-3'-phosphate
  misc_feature 1..19: note = RNA
  misc_feature 20..21: note = DNA
agatgaatttgccgaagattt

SEQ ID NO: 2265 - DNA, 21 bp, synthetic construct
  source 1..21: mol_type = other DNA
  modified_base 1: mod_base = OTHER; note = cytidine-3'-phosphate
  modified_base 2: mod_base = OTHER; note = cytidine-3'-phosphate
  modified_base 3: mod_base = OTHER; note = guanosine-3'-phosphate
  modified_base 4: mod_base = OTHER; note = adenosine-3'-phosphate
  modified_base 5: mod_base = OTHER; note = adenosine-3'-phosphate
  modified_base 6: mod_base = OTHER; note = guanosine-3'-phosphate
  modified_base 7: mod_base = OTHER; note = adenosine-3'-phosphate
  modified_base 8: mod_base = OTHER; note = uridine-3'-phosphate
  modified_base 9: mod_base = OTHER; note = adenosine-3'-phosphate
  modified_base 10: mod_base = OTHER; note = uridine-3'-phosphate
  modified_base 11: mod_base = OTHER; note = cytidine-3'-phosphate
  modified_base 12: mod_base = OTHER; note = uridine-3'-phosphate
  modified_base 13: mod_base = OTHER; note = uridine-3'-phosphate
  modified_base 14: mod_base = OTHER; note = uridine-3'-phosphate
  modified_base 15: mod_base = OTHER; note = uridine-3'-phosphate
  modified_base 16: mod_base = OTHER; note = uridine-3'-phosphate
  modified_base 17: mod_base = OTHER; note = adenosine-3'-phosphate
  modified_base 18: mod_base = OTHER; note = adenosine-3'-phosphate
  modified_base 19: mod_base = OTHER; note = adenosine-3'-phosphate
  misc_feature 1..19: note = RNA
  misc_feature 20..21: note = DNA
ccgaagatatctttttaaatt

SEQ ID NO: 2266 - DNA, 21 bp, synthetic construct
  source 1..21: mol_type = other DNA
  modified_base 1: mod_base = OTHER; note = cytidine-3'-phosphate
  modified_base 2: mod_base = OTHER; note = uridine-3'-phosphate
  modified_base 3: mod_base = OTHER; note = uridine-3'-phosphate
  modified_base 4: mod_base = OTHER; note = uridine-3'-phosphate
  modified_base 5: mod_base = OTHER; note = uridine-3'-phosphate
  modified_base 6: mod_base = OTHER; note = uridine-3'-phosphate
  modified_base 7: mod_base = OTHER; note = adenosine-3'-phosphate
  modified_base 8: mod_base = OTHER; note = adenosine-3'-phosphate
  modified_base 9: mod_base = OTHER; note = adenosine-3'-phosphate
  modified_base 10: mod_base = OTHER; note = uridine-3'-phosphate
  modified_base 11: mod_base = OTHER; note = guanosine-3'-phosphate
  modified_base 12: mod_base = OTHER; note = guanosine-3'-phosphate
  modified_base 13: mod_base = OTHER; note = adenosine-3'-phosphate
  modified_base 14: mod_base = OTHER; note = uridine-3'-phosphate
  modified_base 15: mod_base = OTHER; note = guanosine-3'-phosphate
  modified_base 16: mod_base = OTHER; note = cytidine-3'-phosphate
  modified_base 17: mod_base = OTHER; note = uridine-3'-phosphate
  modified_base 18: mod_base = OTHER; note = adenosine-3'-phosphate
  modified_base 19: mod_base = OTHER; note = adenosine-3'-phosphate
  misc_feature 1..19: note = RNA
  misc_feature 20..21: note = DNA
ctttttaaatggatgctaatt

SEQ ID NO: 2267 - DNA, 21 bp, synthetic construct
  source 1..21: mol_type = other DNA
  modified_base 1: mod_base = OTHER; note = guanosine-3'-phosphate
  modified_base 2: mod_base = OTHER; note = guanosine-3'-phosphate
  modified_base 3: mod_base = OTHER; note = adenosine-3'-phosphate
  modified_base 4: mod_base = OTHER; note = uridine-3'-phosphate
  modified_base 5: mod_base = OTHER; note = guanosine-3'-phosphate
  modified_base 6: mod_base = OTHER; note = cytidine-3'-phosphate
  modified_base 7: mod_base = OTHER; note = uridine-3'-phosphate
  modified_base 8: mod_base = OTHER; note = adenosine-3'-phosphate
  modified_base 9: mod_base = OTHER; note = adenosine-3'-phosphate
  modified_base 10: mod_base = OTHER; note = adenosine-3'-phosphate
  modified_base 11: mod_base = OTHER; note = adenosine-3'-phosphate
  modified_base 12: mod_base = OTHER; note = uridine-3'-phosphate
  modified_base 13: mod_base = OTHER; note = uridine-3'-phosphate
  modified_base 14: mod_base = OTHER; note = cytidine-3'-phosphate
  modified_base 15: mod_base = OTHER; note = cytidine-3'-phosphate
  modified_base 16: mod_base = OTHER; note = uridine-3'-phosphate
  modified_base 17: mod_base = OTHER; note = guanosine-3'-phosphate
  modified_base 18: mod_base = OTHER; note = adenosine-3'-phosphate
  modified_base 19: mod_base = OTHER; note = adenosine-3'-phosphate
  misc_feature 1..19: note = RNA
  misc_feature 20..21: note = DNA
ggatgctaaaattcctgaatt

SEQ ID NO: 2268 - DNA, 21 bp, synthetic construct
  source 1..21: mol_type = other DNA
  modified_base 1: mod_base = OTHER; note = uridine-3'-phosphate
  modified_base 2: mod_base = OTHER; note = adenosine-3'-phosphate
  modified_base 3: mod_base = OTHER; note = adenosine-3'-phosphate
  modified_base 4: mod_base = OTHER; note = adenosine-3'-phosphate
  modified_base 5: mod_base = OTHER; note = adenosine-3'-phosphate
  modified_base 6: mod_base = OTHER; note = uridine-3'-phosphate
  modified_base 7: mod_base = OTHER; note = uridine-3'-phosphate
  modified_base 8: mod_base = OTHER; note = cytidine-3'-phosphate
  modified_base 9: mod_base = OTHER; note = cytidine-3'-phosphate
  modified_base 10: mod_base = OTHER; note = uridine-3'-phosphate
  modified_base 11: mod_base = OTHER; note = guanosine-3'-phosphate
  modified_base 12: mod_base = OTHER; note = adenosine-3'-phosphate
  modified_base 13: mod_base = OTHER; note = adenosine-3'-phosphate
  modified_base 14: mod_base = OTHER; note = guanosine-3'-phosphate
  modified_base 15: mod_base = OTHER; note = uridine-3'-phosphate
  modified_base 16: mod_base = OTHER; note = uridine-3'-phosphate
  modified_base 17: mod_base = OTHER; note = cytidine-3'-phosphate
  modified_base 18: mod_base = OTHER; note = adenosine-3'-phosphate
  modified_base 19: mod_base = OTHER; note = guanosine-3'-phosphate
  misc_feature 1..19: note = RNA
  misc_feature 20..21: note = DNA
taaaattcctgaagttcagtt

SEQ ID NO: 2269 - DNA, 21 bp, synthetic construct
  source 1..21: mol_type = other DNA
  modified_base 1: mod_base = OTHER; note = adenosine-3'-phosphate
  modified_base 2: mod_base = OTHER; note = guanosine-3'-phosphate
  modified_base 3: mod_base = OTHER; note = uridine-3'-phosphate
  modified_base 4: mod_base = OTHER; note = uridine-3'-phosphate
  modified_base 5: mod_base = OTHER; note = cytidine-3'-phosphate
  modified_base 6: mod_base = OTHER; note = adenosine-3'-phosphate
  modified_base 7: mod_base = OTHER; note = guanosine-3'-phosphate
  modified_base 8: mod_base = OTHER; note = cytidine-3'-phosphate
  modified_base 9: mod_base = OTHER; note = uridine-3'-phosphate
  modified_base 10: mod_base = OTHER; note = guanosine-3'-phosphate
  modified_base 11: mod_base = OTHER; note = cytidine-3'-phosphate
  modified_base 12: mod_base = OTHER; note = adenosine-3'-phosphate
  modified_base 13: mod_base = OTHER; note = uridine-3'-phosphate
  modified_base 14: mod_base = OTHER; note = adenosine-3'-phosphate
  modified_base 15: mod_base = OTHER; note = cytidine-3'-phosphate
  modified_base 16: mod_base = OTHER; note = adenosine-3'-phosphate
  modified_base 17: mod_base = OTHER; note = guanosine-3'-phosphate
  modified_base 18: mod_base = OTHER; note = uridine-3'-phosphate
  modified_base 19: mod_base = OTHER; note = uridine-3'-phosphate
  misc_feature 1..19: note = RNA
  misc_feature 20..21: note = DNA
agttcagctgcatacagtttt

SEQ ID NO: 2270 - DNA, 21 bp, synthetic construct
  source 1..21: mol_type = other DNA
  modified_base 1: mod_base = OTHER; note = guanosine-3'-phosphate
  modified_base 2: mod_base = OTHER; note = cytidine-3'-phosphate
  modified_base 3: mod_base = OTHER; note = adenosine-3'-phosphate
  modified_base 4: mod_base = OTHER; note = uridine-3'-phosphate
  modified_base 5: mod_base = OTHER; note = adenosine-3'-phosphate
  modified_base 6: mod_base = OTHER; note = cytidine-3'-phosphate
  modified_base 7: mod_base = OTHER; note = adenosine-3'-phosphate
  modified_base 8: mod_base = OTHER; note = guanosine-3'-phosphate
  modified_base 9: mod_base = OTHER; note = uridine-3'-phosphate
  modified_base 10: mod_base = OTHER; note = uridine-3'-phosphate
  modified_base 11: mod_base = OTHER; note = uridine-3'-phosphate
  modified_base 12: mod_base = OTHER; note = guanosine-3'-phosphate
  modified_base 13: mod_base = OTHER; note = cytidine-3'-phosphate
  modified_base 14: mod_base = OTHER; note = adenosine-3'-phosphate
  modified_base 15: mod_base = OTHER; note = cytidine-3'-phosphate
  modified_base 16: mod_base = OTHER; note = uridine-3'-phosphate
  modified_base 17: mod_base = OTHER; note = uridine-3'-phosphate
  modified_base 18: mod_base = OTHER; note = adenosine-3'-phosphate
  modified_base 19: mod_base = OTHER; note = uridine-3'-phosphate
  misc_feature 1..19: note = RNA
  misc_feature 20..21: note = DNA
gcatacagtttgcacttattt

SEQ ID NO: 2271 - DNA, 21 bp, synthetic construct
  source 1..21: mol_type = other DNA
  modified_base 1: mod_base = OTHER; note = adenosine-3'-phosphate
  modified_base 2: mod_base = OTHER; note = cytidine-3'-phosphate
  modified_base 3: mod_base = OTHER; note = uridine-3'-phosphate
  modified_base 4: mod_base = OTHER; note = uridine-3'-phosphate
  modified_base 5: mod_base = OTHER; note = adenosine-3'-phosphate
  modified_base 6: mod_base = OTHER; note = uridine-3'-phosphate
  modified_base 7: mod_base = OTHER; note = guanosine-3'-phosphate
  modified_base 8: mod_base = OTHER; note = guanosine-3'-phosphate
  modified_base 9: mod_base = OTHER; note = adenosine-3'-phosphate
  modified_base 10: mod_base = OTHER; note = cytidine-3'-phosphate
  modified_base 11: mod_base = OTHER; note = uridine-3'-phosphate
  modified_base 12: mod_base = OTHER; note = cytidine-3'-phosphate
  modified_base 13: mod_base = OTHER; note = cytidine-3'-phosphate
  modified_base 14: mod_base = OTHER; note = uridine-3'-phosphate
  modified_base 15: mod_base = OTHER; note = guanosine-3'-phosphate
  modified_base 16: mod_base = OTHER; note = uridine-3'-phosphate
  modified_base 17: mod_base = OTHER; note = uridine-3'-phosphate
  modified_base 18: mod_base = OTHER; note = guanosine-3'-phosphate
  modified_base 19: mod_base = OTHER; note = uridine-3'-phosphate
  misc_feature 1..19: note = RNA
  misc_feature 20..21: note = DNA
acttatggactcctgttgttt

SEQ ID NO: 2272 - DNA, 21 bp, synthetic construct
  source 1..21: mol_type = other DNA
  modified_base 1: mod_base = OTHER; note = guanosine-3'-phosphate
  modified_base 2: mod_base = OTHER; note = guanosine-3'-phosphate
  modified_base 3: mod_base = OTHER; note = adenosine-3'-phosphate
  modified_base 4: mod_base = OTHER; note = cytidine-3'-phosphate
  modified_base 5: mod_base = OTHER; note = uridine-3'-phosphate
  modified_base 6: mod_base = OTHER; note = cytidine-3'-phosphate
  modified_base 7: mod_base = OTHER; note = cytidine-3'-phosphate
  modified_base 8: mod_base = OTHER; note = uridine-3'-phosphate
  modified_base 9: mod_base = OTHER; note = guanosine-3'-phosphate
  modified_base 10: mod_base = OTHER; note = uridine-3'-phosphate
  modified_base 11: mod_base = OTHER; note = uridine-3'-phosphate
  modified_base 12: mod_base = OTHER; note = guanosine-3'-phosphate
  modified_base 13: mod_base = OTHER; note = uridine-3'-phosphate
  modified_base 14: mod_base = OTHER; note = uridine-3'-phosphate
  modified_base 15: mod_base = OTHER; note = guanosine-3'-phosphate
  modified_base 16: mod_base = OTHER; note = adenosine-3'-phosphate
  modified_base 17: mod_base = OTHER; note = adenosine-3'-phosphate
  modified_base 18: mod_base = OTHER; note = guanosine-3'-phosphate
  modified_base 19: mod_base = OTHER; note = uridine-3'-phosphate
  misc_feature 1..19: note = RNA
  misc_feature 20..21: note = DNA
ggactcctgttgttgaagttt

SEQ ID NO: 2273 - DNA, 21 bp, synthetic construct
  source 1..21: mol_type = other DNA
  modified_base 1: mod_base = OTHER; note = uridine-3'-phosphate
  modified_base 2: mod_base = OTHER; note = guanosine-3'-phosphate
  modified_base 3: mod_base = OTHER; note = uridine-3'-phosphate
  modified_base 4: mod_base = OTHER; note = uridine-3'-phosphate
  modified_base 5: mod_base = OTHER; note = guanosine-3'-phosphate
  modified_base 6: mod_base = OTHER; note = adenosine-3'-phosphate
  modified_base 7: mod_base = OTHER; note = adenosine-3'-phosphate
  modified_base 8: mod_base = OTHER; note = guanosine-3'-phosphate
  modified_base 9: mod_base = OTHER; note = uridine-3'-phosphate
  modified_base 10: mod_base = OTHER; note = uridine-3'-phosphate
  modified_base 11: mod_base = OTHER; note = cytidine-3'-phosphate
  modified_base 12: mod_base = OTHER; note = guanosine-3'-phosphate
  modified_base 13: mod_base = OTHER; note = uridine-3'-phosphate
  modified_base 14: mod_base = OTHER; note = uridine-3'-phosphate
  modified_base 15: mod_base = OTHER; note = uridine-3'-phosphate
  modified_base 16: mod_base = OTHER; note = uridine-3'-phosphate
  modified_base 17: mod_base = OTHER; note = uridine-3'-phosphate
  modified_base 18: mod_base = OTHER; note = uridine-3'-phosphate
  modified_base 19: mod_base = OTHER; note = uridine-3'-phosphate
  misc_feature 1..19: note = RNA
  misc_feature 20..21: note = DNA
tgttgaagttcgttttttttt

SEQ ID NO: 2274 - DNA, 21 bp, synthetic construct
  source 1..21: mol_type = other DNA
  modified_base 1: mod_base = OTHER; note = uridine-3'-phosphate
  modified_base 2: mod_base = OTHER; note = uridine-3'-phosphate
  modified_base 3: mod_base = OTHER; note = uridine-3'-phosphate
  modified_base 4: mod_base = OTHER; note = uridine-3'-phosphate
  modified_base 5: mod_base = OTHER; note = uridine-3'-phosphate
  modified_base 6: mod_base = OTHER; note = uridine-3'-phosphate
  modified_base 7: mod_base = OTHER; note = guanosine-3'-phosphate
  modified_base 8: mod_base = OTHER; note = uridine-3'-phosphate
  modified_base 9: mod_base = OTHER; note = uridine-3'-phosphate
  modified_base 10: mod_base = OTHER; note = uridine-3'-phosphate
  modified_base 11: mod_base = OTHER; note = uridine-3'-phosphate
  modified_base 12: mod_base = OTHER; note = cytidine-3'-phosphate
  modified_base 13: mod_base = OTHER; note = uridine-3'-phosphate
  modified_base 14: mod_base = OTHER; note = uridine-3'-phosphate
  modified_base 15: mod_base = OTHER; note = cytidine-3'-phosphate
  modified_base 16: mod_base = OTHER; note = uridine-3'-phosphate
  modified_base 17: mod_base = OTHER; note = uridine-3'-phosphate
  modified_base 18: mod_base = OTHER; note = uridine-3'-phosphate
  modified_base 19: mod_base = OTHER; note = uridine-3'-phosphate
  misc_feature 1..19: note = RNA
  misc_feature 20..21: note = DNA
ttttttgttttcttctttttt

SEQ ID NO: 2275 - DNA, 21 bp, synthetic construct
  source 1..21: mol_type = other DNA
  modified_base 1: mod_base = OTHER; note = uridine-3'-phosphate
  modified_base 2: mod_base = OTHER; note = cytidine-3'-phosphate
  modified_base 3: mod_base = OTHER; note = uridine-3'-phosphate
  modified_base 4: mod_base = OTHER; note = uridine-3'-phosphate
  modified_base 5: mod_base = OTHER; note = cytidine-3'-phosphate
  modified_base 6: mod_base = OTHER; note = uridine-3'-phosphate
  modified_base 7: mod_base = OTHER; note = uridine-3'-phosphate
  modified_base 8: mod_base = OTHER; note = uridine-3'-phosphate
  modified_base 9: mod_base = OTHER; note = uridine-3'-phosphate
  modified_base 10: mod_base = OTHER; note = uridine-3'-phosphate
  modified_base 11: mod_base = OTHER; note = uridine-3'-phosphate
  modified_base 12: mod_base = OTHER; note = uridine-3'-phosphate
  modified_base 13: mod_base = OTHER; note = adenosine-3'-phosphate
  modified_base 14: mod_base = OTHER; note = adenosine-3'-phosphate
  modified_base 15: mod_base = OTHER; note = adenosine-3'-phosphate
  modified_base 16: mod_base = OTHER; note = cytidine-3'-phosphate
  modified_base 17: mod_base = OTHER; note = adenosine-3'-phosphate
  modified_base 18: mod_base = OTHER; note = uridine-3'-phosphate
  modified_base 19: mod_base = OTHER; note = uridine-3'-phosphate
  misc_feature 1..19: note = RNA
  misc_feature 20..21: note = DNA
tcttctttttttaaacatttt

SEQ ID NO: 2276 - DNA, 21 bp, synthetic construct
  source 1..21: mol_type = other DNA
  modified_base 1: mod_base = OTHER; note = uridine-3'-phosphate
  modified_base 2: mod_base = OTHER; note = uridine-3'-phosphate
  modified_base 3: mod_base = OTHER; note = uridine-3'-phosphate
  modified_base 4: mod_base = OTHER; note = uridine-3'-phosphate
  modified_base 5: mod_base = OTHER; note = uridine-3'-phosphate
  modified_base 6: mod_base = OTHER; note = adenosine-3'-phosphate
  modified_base 7: mod_base = OTHER; note = adenosine-3'-phosphate
  modified_base 8: mod_base = OTHER; note = adenosine-3'-phosphate
  modified_base 9: mod_base = OTHER; note = cytidine-3'-phosphate
  modified_base 10: mod_base = OTHER; note = adenosine-3'-phosphate
  modified_base 11: mod_base = OTHER; note = uridine-3'-phosphate
  modified_base 12: mod_base = OTHER; note = uridine-3'-phosphate
  modified_base 13: mod_base = OTHER; note = cytidine-3'-phosphate
  modified_base 14: mod_base = OTHER; note = adenosine-3'-phosphate
  modified_base 15: mod_base = OTHER; note = uridine-3'-phosphate
  modified_base 16: mod_base = OTHER; note = adenosine-3'-phosphate
  modified_base 17: mod_base = OTHER; note = guanosine-3'-phosphate
  modified_base 18: mod_base = OTHER; note = cytidine-3'-phosphate
  modified_base 19: mod_base = OTHER; note = uridine-3'-phosphate
  misc_feature 1..19: note = RNA
  misc_feature 20..21: note = DNA
tttttaaacattcatagcttt

SEQ ID NO: 2277 - DNA, 21 bp, synthetic construct
  source 1..21: mol_type = other DNA
  modified_base 1: mod_base = OTHER; note = adenosine-3'-phosphate
  modified_base 2: mod_base = OTHER; note = uridine-3'-phosphate
  modified_base 3: mod_base = OTHER; note = adenosine-3'-phosphate
  modified_base 4: mod_base = OTHER; note = guanosine-3'-phosphate
  modified_base 5: mod_base = OTHER; note = cytidine-3'-phosphate
  modified_base 6: mod_base = OTHER; note = uridine-3'-phosphate
  modified_base 7: mod_base = OTHER; note = guanosine-3'-phosphate
  modified_base 8: mod_base = OTHER; note = guanosine-3'-phosphate
  modified_base 9: mod_base = OTHER; note = uridine-3'-phosphate
  modified_base 10: mod_base = OTHER; note = cytidine-3'-phosphate
  modified_base 11: mod_base = OTHER; note = uridine-3'-phosphate
  modified_base 12: mod_base = OTHER; note = uridine-3'-phosphate
  modified_base 13: mod_base = OTHER; note = adenosine-3'-phosphate
  modified_base 14: mod_base = OTHER; note = uridine-3'-phosphate
  modified_base 15: mod_base = OTHER; note = uridine-3'-phosphate
  modified_base 16: mod_base = OTHER; note = uridine-3'-phosphate
  modified_base 17: mod_base = OTHER; note = guanosine-3'-phosphate
  modified_base 18: mod_base = OTHER; note = uridine-3'-phosphate
  modified_base 19: mod_base = OTHER; note = adenosine-3'-phosphate
  misc_feature 1..19: note = RNA
  misc_feature 20..21: note = DNA
atagctggtcttatttgtatt

SEQ ID NO: 2278 - DNA, 21 bp, synthetic construct
  source 1..21: mol_type = other DNA
  modified_base 1: mod_base = OTHER; note = guanosine-3'-phosphate
  modified_base 2: mod_base = OTHER; note = uridine-3'-phosphate
  modified_base 3: mod_base = OTHER; note = cytidine-3'-phosphate
  modified_base 4: mod_base = OTHER; note = uridine-3'-phosphate
  modified_base 5: mod_base = OTHER; note = uridine-3'-phosphate
  modified_base 6: mod_base = OTHER; note = adenosine-3'-phosphate
  modified_base 7: mod_base = OTHER; note = uridine-3'-phosphate
  modified_base 8: mod_base = OTHER; note = uridine-3'-phosphate
  modified_base 9: mod_base = OTHER; note = uridine-3'-phosphate
  modified_base 10: mod_base = OTHER; note = guanosine-3'-phosphate
  modified_base 11: mod_base = OTHER; note = uridine-3'-phosphate
  modified_base 12: mod_base = OTHER; note = adenosine-3'-phosphate
  modified_base 13: mod_base = OTHER; note = adenosine-3'-phosphate
  modified_base 14: mod_base = OTHER; note = adenosine-3'-phosphate
  modified_base 15: mod_base = OTHER; note = guanosine-3'-phosphate
  modified_base 16: mod_base = OTHER; note = cytidine-3'-phosphate
  modified_base 17: mod_base = OTHER; note = uridine-3'-phosphate
  modified_base 18: mod_base = OTHER; note = cytidine-3'-phosphate
  modified_base 19: mod_base = OTHER; note = adenosine-3'-phosphate
  misc_feature 1..19: note = RNA
  misc_feature 20..21: note = DNA
gtcttatttgtaaagctcatt

SEQ ID NO: 2279 - DNA, 21 bp, synthetic construct
  source 1..21: mol_type = other DNA
  modified_base 1: mod_base = OTHER; note = adenosine-3'-phosphate
  modified_base 2: mod_base = OTHER; note = adenosine-3'-phosphate
  modified_base 3: mod_base = OTHER; note = adenosine-3'-phosphate
  modified_base 4: mod_base = OTHER; note = guanosine-3'-phosphate
  modified_base 5: mod_base = OTHER; note = cytidine-3'-phosphate
  modified_base 6: mod_base = OTHER; note = uridine-3'-phosphate
  modified_base 7: mod_base = OTHER; note = cytidine-3'-phosphate
  modified_base 8: mod_base = OTHER; note = adenosine-3'-phosphate
  modified_base 9: mod_base = OTHER; note = cytidine-3'-phosphate
  modified_base 10: mod_base = OTHER; note = uridine-3'-phosphate
  modified_base 11: mod_base = OTHER; note = uridine-3'-phosphate
  modified_base 12: mod_base = OTHER; note = uridine-3'-phosphate
  modified_base 13: mod_base = OTHER; note = adenosine-3'-phosphate
  modified_base 14: mod_base = OTHER; note = cytidine-3'-phosphate
  modified_base 15: mod_base = OTHER; note = uridine-3'-phosphate
  modified_base 16: mod_base = OTHER; note = uridine-3'-phosphate
  modified_base 17: mod_base = OTHER; note = adenosine-3'-phosphate
  modified_base 18: mod_base = OTHER; note = guanosine-3'-phosphate
  modified_base 19: mod_base = OTHER; note = adenosine-3'-phosphate
  misc_feature 1..19: note = RNA
  misc_feature 20..21: note = DNA
aaagctcactttacttagatt

SEQ ID NO: 2280 - DNA, 21 bp, synthetic construct
  source 1..21: mol_type = other DNA
  modified_base 1: mod_base = OTHER; note = adenosine-3'-phosphate
  modified_base 2: mod_base = OTHER; note = cytidine-3'-phosphate
  modified_base 3: mod_base = OTHER; note = uridine-3'-phosphate
  modified_base 4: mod_base = OTHER; note = uridine-3'-phosphate
  modified_base 5: mod_base = OTHER; note = adenosine-3'-phosphate
  modified_base 6: mod_base = OTHER; note = guanosine-3'-phosphate
  modified_base 7: mod_base = OTHER; note = adenosine-3'-phosphate
  modified_base 8: mod_base = OTHER; note = adenosine-3'-phosphate
  modified_base 9: mod_base = OTHER; note = uridine-3'-phosphate
  modified_base 10: mod_base = OTHER; note = uridine-3'-phosphate
  modified_base 11: mod_base = OTHER; note = adenosine-3'-phosphate
  modified_base 12: mod_base = OTHER; note = guanosine-3'-phosphate
  modified_base 13: mod_base = OTHER; note = uridine-3'-phosphate
  modified_base 14: mod_base = OTHER; note = guanosine-3'-phosphate
  modified_base 15: mod_base = OTHER; note = guanosine-3'-phosphate
  modified_base 16: mod_base = OTHER; note = cytidine-3'-phosphate
  modified_base 17: mod_base = OTHER; note = adenosine-3'-phosphate
  modified_base 18: mod_base = OTHER; note = cytidine-3'-phosphate
  modified_base 19: mod_base = OTHER; note = uridine-3'-phosphate
  misc_feature 1..19: note = RNA
  misc_feature 20..21: note = DNA
acttagaattagtggcacttt

SEQ ID NO: 2281 - DNA, 21 bp, synthetic construct
  source 1..21: mol_type = other DNA
  modified_base 1: mod_base = OTHER; note = adenosine-3'-phosphate
  modified_base 2: mod_base = OTHER; note = guanosine-3'-phosphate
  modified_base 3: mod_base = OTHER; note = uridine-3'-phosphate
  modified_base 4: mod_base = OTHER; note = guanosine-3'-phosphate
  modified_base 5: mod_base = OTHER; note = guanosine-3'-phosphate
  modified_base 6: mod_base = OTHER; note = cytidine-3'-phosphate
  modified_base 7: mod_base = OTHER; note = adenosine-3'-phosphate
  modified_base 8: mod_base = OTHER; note = cytidine-3'-phosphate
  modified_base 9: mod_base = OTHER; note = uridine-3'-phosphate
  modified_base 10: mod_base = OTHER; note = uridine-3'-phosphate
  modified_base 11: mod_base = OTHER; note = guanosine-3'-phosphate
  modified_base 12: mod_base = OTHER; note = cytidine-3'-phosphate
  modified_base 13: mod_base = OTHER; note = uridine-3'-phosphate
  modified_base 14: mod_base = OTHER; note = uridine-3'-phosphate
  modified_base 15: mod_base = OTHER; note = uridine-3'-phosphate
  modified_base 16: mod_base = OTHER; note = uridine-3'-phosphate
  modified_base 17: mod_base = OTHER; note = adenosine-3'-phosphate
  modified_base 18: mod_base = OTHER; note = uridine-3'-phosphate
  modified_base 19: mod_base = OTHER; note = uridine-3'-phosphate
  misc_feature 1..19: note = RNA
  misc_feature 20..21: note = DNA
agtggcacttgcttttatttt

SEQ ID NO: 2282 - DNA, 21 bp, synthetic construct
  source 1..21: mol_type = other DNA
  modified_base 1: mod_base = OTHER; note = guanosine-3'-phosphate
  modified_base 2: mod_base = OTHER; note = cytidine-3'-phosphate
  modified_base 3: mod_base = OTHER; note = uridine-3'-phosphate
  modified_base 4: mod_base = OTHER; note = uridine-3'-phosphate
  modified_base 5: mod_base = OTHER; note = uridine-3'-phosphate
  modified_base 6: mod_base = OTHER; note = uridine-3'-phosphate
  modified_base 7: mod_base = OTHER; note = adenosine-3'-phosphate
  modified_base 8: mod_base = OTHER; note = uridine-3'-phosphate
  modified_base 9: mod_base = OTHER; note = uridine-3'-phosphate
  modified_base 10: mod_base = OTHER; note = adenosine-3'-phosphate
  modified_base 11: mod_base = OTHER; note = guanosine-3'-phosphate
  modified_base 12: mod_base = OTHER; note = adenosine-3'-phosphate
  modified_base 13: mod_base = OTHER; note = guanosine-3'-phosphate
  modified_base 14: mod_base = OTHER; note = adenosine-3'-phosphate
  modified_base 15: mod_base = OTHER; note = adenosine-3'-phosphate
  modified_base 16: mod_base = OTHER; note = uridine-3'-phosphate
  modified_base 17: mod_base = OTHER; note = guanosine-3'-phosphate
  modified_base 18: mod_base = OTHER; note = adenosine-3'-phosphate
  modified_base 19: mod_base = OTHER; note = uridine-3'-phosphate
  misc_feature 1..19: note = RNA
  misc_feature 20..21: note = DNA
gcttttattagagaatgattt

SEQ ID NO: 2283 - DNA, 21 bp, synthetic construct
  source 1..21: mol_type = other DNA
  modified_base 1: mod_base = OTHER; note = guanosine-3'-phosphate
  modified_base 2: mod_base = OTHER; note = adenosine-3'-phosphate
  modified_base 3: mod_base = OTHER; note = guanosine-3'-phosphate
  modified_base 4: mod_base = OTHER; note = adenosine-3'-phosphate
  modified_base 5: mod_base = OTHER; note = adenosine-3'-phosphate
  modified_base 6: mod_base = OTHER; note = uridine-3'-phosphate
  modified_base 7: mod_base = OTHER; note = guanosine-3'-phosphate
  modified_base 8: mod_base = OTHER; note = adenosine-3'-phosphate
  modified_base 9: mod_base = OTHER; note = uridine-3'-phosphate
  modified_base 10: mod_base = OTHER; note = uridine-3'-phosphate
  modified_base 11: mod_base = OTHER; note = uridine-3'-phosphate
  modified_base 12: mod_base = OTHER; note = cytidine-3'-phosphate
  modified_base 13: mod_base = OTHER; note = adenosine-3'-phosphate
  modified_base 14: mod_base = OTHER; note = adenosine-3'-phosphate
  modified_base 15: mod_base = OTHER; note = adenosine-3'-phosphate
  modified_base 16: mod_base = OTHER; note = uridine-3'-phosphate
  modified_base 17: mod_base = OTHER; note = guanosine-3'-phosphate
  modified_base 18: mod_base = OTHER; note = cytidine-3'-phosphate
  modified_base 19: mod_base = OTHER; note = uridine-3'-phosphate
  misc_feature 1..19: note = RNA
  misc_feature 20..21: note = DNA
gagaatgatttcaaatgcttt

SEQ ID NO: 2284 - DNA, 21 bp, synthetic construct
  source 1..21: mol_type = other DNA
  modified_base 1: mod_base = OTHER; note = uridine-3'-phosphate
  modified_base 2: mod_base = OTHER; note = uridine-3'-phosphate
  modified_base 3: mod_base = OTHER; note = uridine-3'-phosphate
  modified_base 4: mod_base = OTHER; note = cytidine-3'-phosphate
  modified_base 5: mod_base = OTHER; note = adenosine-3'-phosphate
  modified_base 6: mod_base = OTHER; note = adenosine-3'-phosphate
  modified_base 7: mod_base = OTHER; note = adenosine-3'-phosphate
  modified_base 8: mod_base = OTHER; note = uridine-3'-phosphate
  modified_base 9: mod_base = OTHER; note = guanosine-3'-phosphate
  modified_base 10: mod_base = OTHER; note = cytidine-3'-phosphate
  modified_base 11: mod_base = OTHER; note = uridine-3'-phosphate
  modified_base 12: mod_base = OTHER; note = guanosine-3'-phosphate
  modified_base 13: mod_base = OTHER; note = uridine-3'-phosphate
  modified_base 14: mod_base = OTHER; note = adenosine-3'-phosphate
  modified_base 15: mod_base = OTHER; note = adenosine-3'-phosphate
  modified_base 16: mod_base = OTHER; note = cytidine-3'-phosphate
  modified_base 17: mod_base = OTHER; note = uridine-3'-phosphate
  modified_base 18: mod_base = OTHER; note = uridine-3'-phosphate
  modified_base 19: mod_base = OTHER; note = uridine-3'-phosphate
  misc_feature 1..19: note = RNA
  misc_feature 20..21: note = DNA
tttcaaatgctgtaacttttt

SEQ ID NO: 2285 - DNA, 21 bp, synthetic construct
  source 1..21: mol_type = other DNA
  modified_base 1: mod_base = OTHER; note = guanosine-3'-phosphate
  modified_base 2: mod_base = OTHER; note = uridine-3'-phosphate
  modified_base 3: mod_base = OTHER; note = adenosine-3'-phosphate
  modified_base 4: mod_base = OTHER; note = adenosine-3'-phosphate
  modified_base 5: mod_base = OTHER; note = cytidine-3'-phosphate
  modified_base 6: mod_base = OTHER; note = uridine-3'-phosphate
  modified_base 7: mod_base = OTHER; note = uridine-3'-phosphate
  modified_base 8: mod_base = OTHER; note = uridine-3'-phosphate
  modified_base 9: mod_base = OTHER; note = cytidine-3'-phosphate
  modified_base 10: mod_base = OTHER; note = uridine-3'-phosphate
  modified_base 11: mod_base = OTHER; note = guanosine-3'-phosphate
  modified_base 12: mod_base = OTHER; note = adenosine-3'-phosphate
  modified_base 13: mod_base = OTHER; note = adenosine-3'-phosphate
  modified_base 14: mod_base = OTHER; note = adenosine-3'-phosphate
  modified_base 15: mod_base = OTHER; note = uridine-3'-phosphate
  modified_base 16: mod_base = OTHER; note = adenosine-3'-phosphate
  modified_base 17: mod_base = OTHER; note = adenosine-3'-phosphate
  modified_base 18: mod_base = OTHER; note = cytidine-3'-phosphate
  modified_base 19: mod_base = OTHER; note = adenosine-3'-phosphate
  misc_feature 1..19: note = RNA
  misc_feature 20..21: note = DNA
gtaactttctgaaataacatt

SEQ ID NO: 2286 - DNA, 21 bp, synthetic construct
  source 1..21: mol_type = other DNA
  modified_base 1: mod_base = OTHER; note = guanosine-3'-phosphate
  modified_base 2: mod_base = OTHER; note = adenosine-3'-phosphate
  modified_base 3: mod_base = OTHER; note = adenosine-3'-phosphate
  modified_base 4: mod_base = OTHER; note = adenosine-3'-phosphate
  modified_base 5: mod_base = OTHER; note = uridine-3'-phosphate
  modified_base 6: mod_base = OTHER; note = adenosine-3'-phosphate
  modified_base 7: mod_base = OTHER; note = adenosine-3'-phosphate
  modified_base 8: mod_base = OTHER; note = cytidine-3'-phosphate
  modified_base 9: mod_base = OTHER; note = adenosine-3'-phosphate
  modified_base 10: mod_base = OTHER; note = uridine-3'-phosphate
  modified_base 11: mod_base = OTHER; note = guanosine-3'-phosphate
  modified_base 12: mod_base = OTHER; note = guanosine-3'-phosphate
  modified_base 13: mod_base = OTHER; note = cytidine-3'-phosphate
  modified_base 14: mod_base = OTHER; note = cytidine-3'-phosphate
  modified_base 15: mod_base = OTHER; note = uridine-3'-phosphate
  modified_base 16: mod_base = OTHER; note = uridine-3'-phosphate
  modified_base 17: mod_base = OTHER; note = guanosine-3'-phosphate
  modified_base 18: mod_base = OTHER; note = guanosine-3'-phosphate
  modified_base 19: mod_base = OTHER; note = adenosine-3'-phosphate
  misc_feature 1..19: note = RNA
  misc_feature 20..21: note = DNA
gaaataacatggccttggatt

SEQ ID NO: 2287 - DNA, 21 bp, synthetic construct
  source 1..21: mol_type = other DNA
  modified_base 1: mod_base = OTHER; note = cytidine-3'-phosphate
  modified_base 2: mod_base = OTHER; note = cytidine-3'-phosphate
  modified_base 3: mod_base = OTHER; note = uridine-3'-phosphate
  modified_base 4: mod_base = OTHER; note = uridine-3'-phosphate
  modified_base 5: mod_base = OTHER; note = guanosine-3'-phosphate
  modified_base 6: mod_base = OTHER; note = guanosine-3'-phosphate
  modified_base 7: mod_base = OTHER; note = adenosine-3'-phosphate
  modified_base 8: mod_base = OTHER; note = guanosine-3'-phosphate
  modified_base 9: mod_base = OTHER; note = guanosine-3'-phosphate
  modified_base 10: mod_base = OTHER; note = guanosine-3'-phosphate
  modified_base 11: mod_base = OTHER; note = cytidine-3'-phosphate
  modified_base 12: mod_base = OTHER; note = adenosine-3'-phosphate
  modified_base 13: mod_base = OTHER; note = uridine-3'-phosphate
  modified_base 14: mod_base = OTHER; note = guanosine-3'-phosphate
  modified_base 15: mod_base = OTHER; note = adenosine-3'-phosphate
  modified_base 16: mod_base = OTHER; note = adenosine-3'-phosphate
  modified_base 17: mod_base = OTHER; note = guanosine-3'-phosphate
  modified_base 18: mod_base = OTHER; note = adenosine-3'-phosphate
  modified_base 19: mod_base = OTHER; note = cytidine-3'-phosphate
  misc_feature 1..19: note = RNA
  misc_feature 20..21: note = DNA
ccttggagggcatgaagactt

SEQ ID NO: 2288 - DNA, 21 bp, synthetic construct
  source 1..21: mol_type = other DNA
  modified_base 1: mod_base = OTHER; note = adenosine-3'-phosphate
  modified_base 2: mod_base = OTHER; note = guanosine-3'-phosphate
  modified_base 3: mod_base = OTHER; note = guanosine-3'-phosphate
  modified_base 4: mod_base = OTHER; note = guanosine-3'-phosphate
  modified_base 5: mod_base = OTHER; note = cytidine-3'-phosphate
  modified_base 6: mod_base = OTHER; note = adenosine-3'-phosphate
  modified_base 7: mod_base = OTHER; note = uridine-3'-phosphate
  modified_base 8: mod_base = OTHER; note = guanosine-3'-phosphate
  modified_base 9: mod_base = OTHER; note = adenosine-3'-phosphate
  modified_base 10: mod_base = OTHER; note = adenosine-3'-phosphate
  modified_base 11: mod_base = OTHER; note = guanosine-3'-phosphate
  modified_base 12: mod_base = OTHER; note = adenosine-3'-phosphate
  modified_base 13: mod_base = OTHER; note = cytidine-3'-phosphate
  modified_base 14: mod_base = OTHER; note = adenosine-3'-phosphate
  modified_base 15: mod_base = OTHER; note = guanosine-3'-phosphate
  modified_base 16: mod_base = OTHER; note = adenosine-3'-phosphate
  modified_base 17: mod_base = OTHER; note = uridine-3'-phosphate
  modified_base 18: mod_base = OTHER; note = adenosine-3'-phosphate
  modified_base 19: mod_base = OTHER; note = cytidine-3'-phosphate
  misc_feature 1..19: note = RNA
  misc_feature 20..21: note = DNA
agggcatgaagacagatactt

SEQ ID NO: 2289 - DNA, 21 bp, synthetic construct
  source 1..21: mol_type = other DNA
  modified_base 1: mod_base = OTHER; note = guanosine-3'-phosphate
  modified_base 2: mod_base = OTHER; note = adenosine-3'-phosphate
  modified_base 3: mod_base = OTHER; note = uridine-3'-phosphate
  modified_base 4: mod_base = OTHER; note = adenosine-3'-phosphate
  modified_base 5: mod_base = OTHER; note = cytidine-3'-phosphate
  modified_base 6: mod_base = OTHER; note = uridine-3'-phosphate
  modified_base 7: mod_base = OTHER; note = cytidine-3'-phosphate
  modified_base 8: mod_base = OTHER; note = cytidine-3'-phosphate
  modified_base 9: mod_base = OTHER; note = uridine-3'-phosphate
  modified_base 10: mod_base = OTHER; note = cytidine-3'-phosphate
  modified_base 11: mod_base = OTHER; note = cytidine-3'-phosphate
  modified_base 12: mod_base = OTHER; note = adenosine-3'-phosphate
  modified_base 13: mod_base = OTHER; note = adenosine-3'-phosphate
  modified_base 14: mod_base = OTHER; note = guanosine-3'-phosphate
  modified_base 15: mod_base = OTHER; note = guanosine-3'-phosphate
  modified_base 16: mod_base = OTHER; note = uridine-3'-phosphate
  modified_base 17: mod_base = OTHER; note = uridine-3'-phosphate
  modified_base 18: mod_base = OTHER; note = adenosine-3'-phosphate
  modified_base 19: mod_base = OTHER; note = uridine-3'-phosphate
  misc_feature 1..19: note = RNA
  misc_feature 20..21: note = DNA
gatactcctccaaggttattt

SEQ ID NO: 2290 - DNA, 21 bp, synthetic construct
  source 1..21: mol_type = other DNA
  modified_base 1: mod_base = OTHER; note = cytidine-3'-phosphate
  modified_base 2: mod_base = OTHER; note = cytidine-3'-phosphate
  modified_base 3: mod_base = OTHER; note = uridine-3'-phosphate
  modified_base 4: mod_base = OTHER; note = cytidine-3'-phosphate
  modified_base 5: mod_base = OTHER; note = cytidine-3'-phosphate
  modified_base 6: mod_base = OTHER; note = adenosine-3'-phosphate
  modified_base 7: mod_base = OTHER; note = adenosine-3'-phosphate
  modified_base 8: mod_base = OTHER; note = guanosine-3'-phosphate
  modified_base 9: mod_base = OTHER; note = guanosine-3'-phosphate
  modified_base 10: mod_base = OTHER; note = uridine-3'-phosphate
  modified_base 11: mod_base = OTHER; note = uridine-3'-phosphate
  modified_base 12: mod_base = OTHER; note = adenosine-3'-phosphate
  modified_base 13: mod_base = OTHER; note = uridine-3'-phosphate
  modified_base 14: mod_base = OTHER; note = uridine-3'-phosphate
  modified_base 15: mod_base = OTHER; note = guanosine-3'-phosphate
  modified_base 16: mod_base = OTHER; note = guanosine-3'-phosphate
  modified_base 17: mod_base = OTHER; note = adenosine-3'-phosphate
  modified_base 18: mod_base = OTHER; note = cytidine-3'-phosphate
  modified_base 19: mod_base = OTHER; note = adenosine-3'-phosphate
  misc_feature 1..19: note = RNA
  misc_feature 20..21: note = DNA
cctccaaggttattggacatt

SEQ ID NO: 2291 - DNA, 21 bp, synthetic construct
  source 1..21: mol_type = other DNA
  modified_base 1: mod_base = OTHER; note = guanosine-3'-phosphate
  modified_base 2: mod_base = OTHER; note = guanosine-3'-phosphate
  modified_base 3: mod_base = OTHER; note = adenosine-3'-phosphate
  modified_base 4: mod_base = OTHER; note = cytidine-3'-phosphate
  modified_base 5: mod_base = OTHER; note = adenosine-3'-phosphate
  modified_base 6: mod_base = OTHER; note = cytidine-3'-phosphate
  modified_base 7: mod_base = OTHER; note = cytidine-3'-phosphate
  modified_base 8: mod_base = OTHER; note = guanosine-3'-phosphate
  modified_base 9: mod_base = OTHER; note = guanosine-3'-phosphate
  modified_base 10: mod_base = OTHER; note = adenosine-3'-phosphate
  modified_base 11: mod_base = OTHER; note = adenosine-3'-phosphate
  modified_base 12: mod_base = OTHER; note = adenosine-3'-phosphate
  modified_base 13: mod_base = OTHER; note = cytidine-3'-phosphate
  modified_base 14: mod_base = OTHER; note = adenosine-3'-phosphate
  modified_base 15: mod_base = OTHER; note = adenosine-3'-phosphate
  modified_base 16: mod_base = OTHER; note = uridine-3'-phosphate
  modified_base 17: mod_base = OTHER; note = adenosine-3'-phosphate
  modified_base 18: mod_base = OTHER; note = adenosine-3'-phosphate
  modified_base 19: mod_base = OTHER; note = adenosine-3'-phosphate
  misc_feature 1..19: note = RNA
  misc_feature 20..21: note = DNA
ggacaccggaaacaataaatt

SEQ ID NO: 2292 - DNA, 21 bp, synthetic construct
  source 1..21: mol_type = other DNA
  modified_base 1: mod_base = OTHER; note = guanosine-3'-phosphate
  modified_base 2: mod_base = OTHER; note = adenosine-3'-phosphate
  modified_base 3: mod_base = OTHER; note = adenosine-3'-phosphate
  modified_base 4: mod_base = OTHER; note = adenosine-3'-phosphate
  modified_base 5: mod_base = OTHER; note = cytidine-3'-phosphate
  modified_base 6: mod_base = OTHER; note = adenosine-3'-phosphate
  modified_base 7: mod_base = OTHER; note = adenosine-3'-phosphate
  modified_base 8: mod_base = OTHER; note = uridine-3'-phosphate
  modified_base 9: mod_base = OTHER; note = adenosine-3'-phosphate
  modified_base 10: mod_base = OTHER; note = adenosine-3'-phosphate
  modified_base 11: mod_base = OTHER; note = adenosine-3'-phosphate
  modified_base 12: mod_base = OTHER; note = uridine-3'-phosphate
  modified_base 13: mod_base = OTHER; note = uridine-3'-phosphate
  modified_base 14: mod_base = OTHER; note = guanosine-3'-phosphate
  modified_base 15: mod_base = OTHER; note = guanosine-3'-phosphate
  modified_base 16: mod_base = OTHER; note = adenosine-3'-phosphate
  modified_base 17: mod_base = OTHER; note = adenosine-3'-phosphate
  modified_base 18: mod_base = OTHER; note = cytidine-3'-phosphate
  modified_base 19: mod_base = OTHER; note = adenosine-3'-phosphate
  misc_feature 1..19: note = RNA
  misc_feature 20..21: note = DNA
gaaacaataaattggaacatt

SEQ ID NO: 2293 - DNA, 21 bp, synthetic construct
  source 1..21: mol_type = other DNA
  modified_base 1: mod_base = OTHER; note = adenosine-3'-phosphate
  modified_base 2: mod_base = OTHER; note = uridine-3'-phosphate
  modified_base 3: mod_base = OTHER; note = uridine-3'-phosphate
  modified_base 4: mod_base = OTHER; note = guanosine-3'-phosphate
  modified_base 5: mod_base = OTHER; note = guanosine-3'-phosphate
  modified_base 6: mod_base = OTHER; note = adenosine-3'-phosphate
  modified_base 7: mod_base = OTHER; note = adenosine-3'-phosphate
  modified_base 8: mod_base = OTHER; note = cytidine-3'-phosphate
  modified_base 9: mod_base = OTHER; note = adenosine-3'-phosphate
  modified_base 10: mod_base = OTHER; note = cytidine-3'-phosphate
  modified_base 11: mod_base = OTHER; note = cytidine-3'-phosphate
  modified_base 12: mod_base = OTHER; note = uridine-3'-phosphate
  modified_base 13: mod_base = OTHER; note = cytidine-3'-phosphate
  modified_base 14: mod_base = OTHER; note = cytidine-3'-phosphate
  modified_base 15: mod_base = OTHER; note = uridine-3'-phosphate
  modified_base 16: mod_base = OTHER; note = cytidine-3'-phosphate
  modified_base 17: mod_base = OTHER; note = adenosine-3'-phosphate
  modified_base 18: mod_base = OTHER; note = adenosine-3'-phosphate
  modified_base 19: mod_base = OTHER; note = adenosine-3'-phosphate
  misc_feature 1..19: note = RNA
  misc_feature 20..21: note = DNA
attggaacacctcctcaaatt

SEQ ID NO: 2294 - DNA, 21 bp, synthetic construct
  source 1..21: mol_type = other DNA
  modified_base 1: mod_base = OTHER; note = uridine-3'-phosphate
  modified_base 2: mod_base = OTHER; note = cytidine-3'-phosphate
  modified_base 3: mod_base = OTHER; note = cytidine-3'-phosphate
  modified_base 4: mod_base = OTHER; note = uridine-3'-phosphate
  modified_base 5: mod_base = OTHER; note = cytidine-3'-phosphate
  modified_base 6: mod_base = OTHER; note = adenosine-3'-phosphate
  modified_base 7: mod_base = OTHER; note = adenosine-3'-phosphate
  modified_base 8: mod_base = OTHER; note = adenosine-3'-phosphate
  modified_base 9: mod_base = OTHER; note = cytidine-3'-phosphate
  modified_base 10: mod_base = OTHER; note = cytidine-3'-phosphate
  modified_base 11: mod_base = OTHER; note = uridine-3'-phosphate
  modified_base 12: mod_base = OTHER; note = adenosine-3'-phosphate
  modified_base 13: mod_base = OTHER; note = cytidine-3'-phosphate
  modified_base 14: mod_base = OTHER; note = cytidine-3'-phosphate
  modified_base 15: mod_base = OTHER; note = adenosine-3'-phosphate
  modified_base 16: mod_base = OTHER; note = cytidine-3'-phosphate
  modified_base 17: mod_base = OTHER; note = uridine-3'-phosphate
  modified_base 18: mod_base = OTHER; note = cytidine-3'-phosphate
  modified_base 19: mod_base = OTHER; note = adenosine-3'-phosphate
  misc_feature 1..19: note = RNA
  misc_feature 20..21: note = DNA
tcctcaaacctaccactcatt

SEQ ID NO: 2295 - DNA, 21 bp, synthetic construct
  source 1..21: mol_type = other DNA
  modified_base 1: mod_base = OTHER; note = cytidine-3'-phosphate
  modified_base 2: mod_base = OTHER; note = uridine-3'-phosphate
  modified_base 3: mod_base = OTHER; note = adenosine-3'-phosphate
  modified_base 4: mod_base = OTHER; note = cytidine-3'-phosphate
  modified_base 5: mod_base = OTHER; note = cytidine-3'-phosphate
  modified_base 6: mod_base = OTHER; note = adenosine-3'-phosphate
  modified_base 7: mod_base = OTHER; note = cytidine-3'-phosphate
  modified_base 8: mod_base = OTHER; note = uridine-3'-phosphate
  modified_base 9: mod_base = OTHER; note = cytidine-3'-phosphate
  modified_base 10: mod_base = OTHER; note = adenosine-3'-phosphate
  modified_base 11: mod_base = OTHER; note = guanosine-3'-phosphate
  modified_base 12: mod_base = OTHER; note = guanosine-3'-phosphate
  modified_base 13: mod_base = OTHER; note = adenosine-3'-phosphate
  modified_base 14: mod_base = OTHER; note = adenosine-3'-phosphate
  modified_base 15: mod_base = OTHER; note = uridine-3'-phosphate
  modified_base 16: mod_base = OTHER; note = guanosine-3'-phosphate
  modified_base 17: mod_base = OTHER; note = uridine-3'-phosphate
  modified_base 18: mod_base = OTHER; note = uridine-3'-phosphate
  modified_base 19: mod_base = OTHER; note = uridine-3'-phosphate
  misc_feature 1..19: note = RNA
  misc_feature 20..21: note = DNA
ctaccactcaggaatgttttt

SEQ ID NO: 2296 - DNA, 21 bp, synthetic construct
  source 1..21: mol_type = other DNA
  modified_base 1: mod_base = OTHER; note = adenosine-3'-phosphate
  modified_base 2: mod_base = OTHER; note = adenosine-3'-phosphate
  modified_base 3: mod_base = OTHER; note = uridine-3'-phosphate
  modified_base 4: mod_base = OTHER; note = guanosine-3'-phosphate
  modified_base 5: mod_base = OTHER; note = uridine-3'-phosphate
  modified_base 6: mod_base = OTHER; note = uridine-3'-phosphate
  modified_base 7: mod_base = OTHER; note = uridine-3'-phosphate
  modified_base 8: mod_base = OTHER; note = guanosine-3'-phosphate
  modified_base 9: mod_base = OTHER; note = cytidine-3'-phosphate
  modified_base 10: mod_base = OTHER; note = uridine-3'-phosphate
  modified_base 11: mod_base = OTHER; note = guanosine-3'-phosphate
  modified_base 12: mod_base = OTHER; note = guanosine-3'-phosphate
  modified_base 13: mod_base = OTHER; note = guanosine-3'-phosphate
  modified_base 14: mod_base = OTHER; note = guanosine-3'-phosphate
  modified_base 15: mod_base = OTHER; note = cytidine-3'-phosphate
  modified_base 16: mod_base = OTHER; note = cytidine-3'-phosphate
  modified_base 17: mod_base = OTHER; note = guanosine-3'-phosphate
  modified_base 18: mod_base = OTHER; note = adenosine-3'-phosphate
  modified_base 19: mod_base = OTHER; note = adenosine-3'-phosphate
  misc_feature 1..19: note = RNA
  misc_feature 20..21: note = DNA
aatgtttgctggggccgaatt

SEQ ID NO: 2297 - DNA, 21 bp, synthetic construct
  source 1..21: mol_type = other DNA
  modified_base 1: mod_base = OTHER; note = uridine-3'-phosphate
  modified_base 2: mod_base = OTHER; note = guanosine-3'-phosphate
  modified_base 3: mod_base = OTHER; note = cytidine-3'-phosphate
  modified_base 4: mod_base = OTHER; note = uridine-3'-phosphate
  modified_base 5: mod_base = OTHER; note = guanosine-3'-phosphate
  modified_base 6: mod_base = OTHER; note = guanosine-3'-phosphate
  modified_base 7: mod_base = OTHER; note = guanosine-3'-phosphate
  modified_base 8: mod_base = OTHER; note = guanosine-3'-phosphate
  modified_base 9: mod_base = OTHER; note = cytidine-3'-phosphate
  modified_base 10: mod_base = OTHER; note = cytidine-3'-phosphate
  modified_base 11: mod_base = OTHER; note = guanosine-3'-phosphate
  modified_base 12: mod_base = OTHER; note = adenosine-3'-phosphate
  modified_base 13: mod_base = OTHER; note = adenosine-3'-phosphate
  modified_base 14: mod_base = OTHER; note = adenosine-3'-phosphate
  modified_base 15: mod_base = OTHER; note = guanosine-3'-phosphate
  modified_base 16: mod_base = OTHER; note = adenosine-3'-phosphate
  modified_base 17: mod_base = OTHER; note = adenosine-3'-phosphate
  modified_base 18: mod_base = OTHER; note = cytidine-3'-phosphate
  modified_base 19: mod_base = OTHER; note = adenosine-3'-phosphate
  misc_feature 1..19: note = RNA
  misc_feature 20..21: note = DNA
tgctggggccgaaagaacatt

SEQ ID NO: 2298 - DNA, 21 bp, synthetic construct
  source 1..21: mol_type = other DNA
  modified_base 1: mod_base = OTHER; note = adenosine-3'-phosphate
  modified_base 2: mod_base = OTHER; note = adenosine-3'-phosphate
  modified_base 3: mod_base = OTHER; note = adenosine-3'-phosphate
  modified_base 4: mod_base = OTHER; note = guanosine-3'-phosphate
  modified_base 5: mod_base = OTHER; note = adenosine-3'-phosphate
  modified_base 6: mod_base = OTHER; note = adenosine-3'-phosphate
  modified_base 7: mod_base = OTHER; note = cytidine-3'-phosphate
  modified_base 8: mod_base = OTHER; note = adenosine-3'-phosphate
  modified_base 9: mod_base = OTHER; note = guanosine-3'-phosphate
  modified_base 10: mod_base = OTHER; note = uridine-3'-phosphate
  modified_base 11: mod_base = OTHER; note = cytidine-3'-phosphate
  modified_base 12: mod_base = OTHER; note = cytidine-3'-phosphate
  modified_base 13: mod_base = OTHER; note = adenosine-3'-phosphate
  modified_base 14: mod_base = OTHER; note = uridine-3'-phosphate
  modified_base 15: mod_base = OTHER; note = uridine-3'-phosphate
  modified_base 16: mod_base = OTHER; note = guanosine-3'-phosphate
  modified_base 17: mod_base = OTHER; note = adenosine-3'-phosphate
  modified_base 18: mod_base = OTHER; note = adenosine-3'-phosphate
  modified_base 19: mod_base = OTHER; note = adenosine-3'-phosphate
  misc_feature 1..19: note = RNA
  misc_feature 20..21: note = DNA
aaagaacagtccattgaaatt

SEQ ID NO: 2299 - DNA, 21 bp, synthetic construct
  source 1..21: mol_type = other DNA
  modified_base 1: mod_base = OTHER; note = cytidine-3'-phosphate
  modified_base 2: mod_base = OTHER; note = adenosine-3'-phosphate
  modified_base 3: mod_base = OTHER; note = uridine-3'-phosphate
  modified_base 4: mod_base = OTHER; note = uridine-3'-phosphate
  modified_base 5: mod_base = OTHER; note = guanosine-3'-phosphate
  modified_base 6: mod_base = OTHER; note = adenosine-3'-phosphate
  modified_base 7: mod_base = OTHER; note = adenosine-3'-phosphate
  modified_base 8: mod_base = OTHER; note = adenosine-3'-phosphate
  modified_base 9: mod_base = OTHER; note = guanosine-3'-phosphate
  modified_base 10: mod_base = OTHER; note = guanosine-3'-phosphate
  modified_base 11: mod_base = OTHER; note = guanosine-3'-phosphate
  modified_base 12: mod_base = OTHER; note = adenosine-3'-phosphate
  modified_base 13: mod_base = OTHER; note = guanosine-3'-phosphate
  modified_base 14: mod_base = OTHER; note = uridine-3'-phosphate
  modified_base 15: mod_base = OTHER; note = adenosine-3'-phosphate
  modified_base 16: mod_base = OTHER; note = uridine-3'-phosphate
  modified_base 17: mod_base = OTHER; note = uridine-3'-phosphate
  modified_base 18: mod_base = OTHER; note = adenosine-3'-phosphate
  modified_base 19: mod_base = OTHER; note = cytidine-3'-phosphate
  misc_feature 1..19: note = RNA
  misc_feature 20..21: note = DNA
cattgaaagggagtattactt

SEQ ID NO: 2300 - DNA, 21 bp, synthetic construct
  source 1..21: mol_type = other DNA
  modified_base 1: mod_base = OTHER; note = guanosine-3'-phosphate
  modified_base 2: mod_base = OTHER; note = guanosine-3'-phosphate
  modified_base 3: mod_base = OTHER; note = adenosine-3'-phosphate
  modified_base 4: mod_base = OTHER; note = guanosine-3'-phosphate
  modified_base 5: mod_base = OTHER; note = uridine-3'-phosphate
  modified_base 6: mod_base = OTHER; note = adenosine-3'-phosphate
  modified_base 7: mod_base = OTHER; note = uridine-3'-phosphate
  modified_base 8: mod_base = OTHER; note = uridine-3'-phosphate
  modified_base 9: mod_base = OTHER; note = adenosine-3'-phosphate
  modified_base 10: mod_base = OTHER; note = cytidine-3'-phosphate
  modified_base 11: mod_base = OTHER; note = adenosine-3'-phosphate
  modified_base 12: mod_base = OTHER; note = adenosine-3'-phosphate
  modified_base 13: mod_base = OTHER; note = adenosine-3'-phosphate
  modified_base 14: mod_base = OTHER; note = adenosine-3'-phosphate
  modified_base 15: mod_base = OTHER; note = adenosine-3'-phosphate
  modified_base 16: mod_base = OTHER; note = cytidine-3'-phosphate
  modified_base 17: mod_base = OTHER; note = adenosine-3'-phosphate
  modified_base 18: mod_base = OTHER; note = uridine-3'-phosphate
  modified_base 19: mod_base = OTHER; note = guanosine-3'-phosphate
  misc_feature 1..19: note = RNA
  misc_feature 20..21: note = DNA
ggagtattacaaaaacatgtt

SEQ ID NO: 2301 - DNA, 21 bp, synthetic construct
  source 1..21: mol_type = other DNA
  modified_base 1: mod_base = OTHER; note = adenosine-3'-phosphate
  modified_base 2: mod_base = OTHER; note = adenosine-3'-phosphate
  modified_base 3: mod_base = OTHER; note = adenosine-3'-phosphate
  modified_base 4: mod_base = OTHER; note = adenosine-3'-phosphate
  modified_base 5: mod_base = OTHER; note = cytidine-3'-phosphate
  modified_base 6: mod_base = OTHER; note = adenosine-3'-phosphate
  modified_base 7: mod_base = OTHER; note = uridine-3'-phosphate
  modified_base 8: mod_base = OTHER; note = guanosine-3'-phosphate
  modified_base 9: mod_base = OTHER; note = guanosine-3'-phosphate
  modified_base 10: mod_base = OTHER; note = cytidine-3'-phosphate
  modified_base 11: mod_base = OTHER; note = cytidine-3'-phosphate
  modified_base 12: mod_base = OTHER; note = uridine-3'-phosphate
  modified_base 13: mod_base = OTHER; note = uridine-3'-phosphate
  modified_base 14: mod_base = OTHER; note = uridine-3'-phosphate
  modified_base 15: mod_base = OTHER; note = guanosine-3'-phosphate
  modified_base 16: mod_base = OTHER; note = cytidine-3'-phosphate
  modified_base 17: mod_base = OTHER; note = uridine-3'-phosphate
  modified_base 18: mod_base = OTHER; note = uridine-3'-phosphate
  modified_base 19: mod_base = OTHER; note = guanosine-3'-phosphate
  misc_feature 1..19: note = RNA
  misc_feature 20..21: note = DNA
aaaacatggcctttgcttgtt

SEQ ID NO: 2302 - DNA, 21 bp, synthetic construct
  source 1..21: mol_type = other DNA
  modified_base 1: mod_base = OTHER; note = guanosine-3'-phosphate
  modified_base 2: mod_base = OTHER; note = cytidine-3'-phosphate
  modified_base 3: mod_base = OTHER; note = cytidine-3'-phosphate
  modified_base 4: mod_base = OTHER; note = uridine-3'-phosphate
  modified_base 5: mod_base = OTHER; note = uridine-3'-phosphate
  modified_base 6: mod_base = OTHER; note = uridine-3'-phosphate
  modified_base 7: mod_base = OTHER; note = guanosine-3'-phosphate
  modified_base 8: mod_base = OTHER; note = cytidine-3'-phosphate
  modified_base 9: mod_base = OTHER; note = uridine-3'-phosphate
  modified_base 10: mod_base = OTHER; note = uridine-3'-phosphate
  modified_base 11: mod_base = OTHER; note = guanosine-3'-phosphate
  modified_base 12: mod_base = OTHER; note = adenosine-3'-phosphate
  modified_base 13: mod_base = OTHER; note = adenosine-3'-phosphate
  modified_base 14: mod_base = OTHER; note = adenosine-3'-phosphate
  modified_base 15: mod_base = OTHER; note = guanosine-3'-phosphate
  modified_base 16: mod_base = OTHER; note = adenosine-3'-phosphate
  modified_base 17: mod_base = OTHER; note = adenosine-3'-phosphate
  modified_base 18: mod_base = OTHER; note = adenosine-3'-phosphate
  modified_base 19: mod_base = OTHER; note = adenosine-3'-phosphate
  misc_feature 1..19: note = RNA
  misc_feature 20..21: note = DNA
gcctttgcttgaaagaaaatt

SEQ ID NO: 2303 - DNA, 21 bp, synthetic construct
  source 1..21: mol_type = other DNA
  modified_base 1: mod_base = OTHER; note = guanosine-3'-phosphate
  modified_base 2: mod_base = OTHER; note = adenosine-3'-phosphate
  modified_base 3: mod_base = OTHER; note = adenosine-3'-phosphate
  modified_base 4: mod_base = OTHER; note = adenosine-3'-phosphate
  modified_base 5: mod_base = OTHER; note = guanosine-3'-phosphate
  modified_base 6: mod_base = OTHER; note = adenosine-3'-phosphate
  modified_base 7: mod_base = OTHER; note = adenosine-3'-phosphate
  modified_base 8: mod_base = OTHER; note = adenosine-3'-phosphate
  modified_base 9: mod_base = OTHER; note = adenosine-3'-phosphate
  modified_base 10: mod_base = OTHER; note = uridine-3'-phosphate
  modified_base 11: mod_base = OTHER; note = adenosine-3'-phosphate
  modified_base 12: mod_base = OTHER; note = cytidine-3'-phosphate
  modified_base 13: mod_base = OTHER; note = cytidine-3'-phosphate
  modified_base 14: mod_base = OTHER; note = adenosine-3'-phosphate
  modified_base 15: mod_base = OTHER; note = adenosine-3'-phosphate
  modified_base 16: mod_base = OTHER; note = guanosine-3'-phosphate
  modified_base 17: mod_base = OTHER; note = guanosine-3'-phosphate
  modified_base 18: mod_base = OTHER; note = adenosine-3'-phosphate
  modified_base 19: mod_base = OTHER; note = adenosine-3'-phosphate
  misc_feature 1..19: note = RNA
  misc_feature 20..21: note = DNA
gaaagaaaataccaaggaatt

SEQ ID NO: 2304 - DNA, 21 bp, synthetic construct
  source 1..21: mol_type = other DNA
  modified_base 1: mod_base = OTHER; note = cytidine-3'-phosphate
  modified_base 2: mod_base = OTHER; note = cytidine-3'-phosphate
  modified_base 3: mod_base = OTHER; note = adenosine-3'-phosphate
  modified_base 4: mod_base = OTHER; note = adenosine-3'-phosphate
  modified_base 5: mod_base = OTHER; note = guanosine-3'-phosphate
  modified_base 6: mod_base = OTHER; note = guanosine-3'-phosphate
  modified_base 7: mod_base = OTHER; note = adenosine-3'-phosphate
  modified_base 8: mod_base = OTHER; note = adenosine-3'-phosphate
  modified_base 9: mod_base = OTHER; note = cytidine-3'-phosphate
  modified_base 10: mod_base = OTHER; note = adenosine-3'-phosphate
  modified_base 11: mod_base = OTHER; note = guanosine-3'-phosphate
  modified_base 12: mod_base = OTHER; note = guanosine-3'-phosphate
  modified_base 13: mod_base = OTHER; note = adenosine-3'-phosphate
  modified_base 14: mod_base = OTHER; note = adenosine-3'-phosphate
  modified_base 15: mod_base = OTHER; note = adenosine-3'-phosphate
  modified_base 16: mod_base = OTHER; note = cytidine-3'-phosphate
  modified_base 17: mod_base = OTHER; note = uridine-3'-phosphate
  modified_base 18: mod_base = OTHER; note = guanosine-3'-phosphate
  modified_base 19: mod_base = OTHER; note = adenosine-3'-phosphate
  misc_feature 1..19: note = RNA
  misc_feature 20..21: note = DNA
ccaaggaacaggaaactgatt

SEQ ID NO: 2305 - DNA, 21 bp, synthetic construct
  source 1..21: mol_type = other DNA
  modified_base 1: mod_base = OTHER; note = adenosine-3'-phosphate
  modified_base 2: mod_base = OTHER; note = adenosine-3'-phosphate
  modified_base 3: mod_base = OTHER; note = cytidine-3'-phosphate
  modified_base 4: mod_base = OTHER; note = uridine-3'-phosphate
  modified_base 5: mod_base = OTHER; note = guanosine-3'-phosphate
  modified_base 6: mod_base = OTHER; note = adenosine-3'-phosphate
  modified_base 7: mod_base = OTHER; note = uridine-3'-phosphate
  modified_base 8: mod_base = OTHER; note = cytidine-3'-phosphate
  modified_base 9: mod_base = OTHER; note = adenosine-3'-phosphate
  modified_base 10: mod_base = OTHER; note = uridine-3'-phosphate
  modified_base 11: mod_base = OTHER; note = uridine-3'-phosphate
  modified_base 12: mod_base = OTHER; note = adenosine-3'-phosphate
  modified_base 13: mod_base = OTHER; note = adenosine-3'-phosphate
  modified_base 14: mod_base = OTHER; note = adenosine-3'-phosphate
  modified_base 15: mod_base = OTHER; note = guanosine-3'-phosphate
  modified_base 16: mod_base = OTHER; note = cytidine-3'-phosphate
  modified_base 17: mod_base = OTHER; note = cytidine-3'-phosphate
  modified_base 18: mod_base = OTHER; note = uridine-3'-phosphate
  modified_base 19: mod_base = OTHER; note = guanosine-3'-phosphate
  misc_feature 1..19: note = RNA
  misc_feature 20..21: note = DNA
aactgatcattaaagcctgtt

SEQ ID NO: 2306 - DNA, 21 bp, synthetic construct
  source 1..21: mol_type = other DNA
  modified_base 1: mod_base = OTHER; note = uridine-3'-phosphate
  modified_base 2: mod_base = OTHER; note = adenosine-3'-phosphate
  modified_base 3: mod_base = OTHER; note = guanosine-3'-phosphate
  modified_base 4: mod_base = OTHER; note = cytidine-3'-phosphate
  modified_base 5: mod_base = OTHER; note = adenosine-3'-phosphate
  modified_base 6: mod_base = OTHER; note = guanosine-3'-phosphate
  modified_base 7: mod_base = OTHER; note = guanosine-3'-phosphate
  modified_base 8: mod_base = OTHER; note = adenosine-3'-phosphate
  modified_base 9: mod_base = OTHER; note = adenosine-3'-phosphate
  modified_base 10: mod_base = OTHER; note = adenosine-3'-phosphate
  modified_base 11: mod_base = OTHER; note = cytidine-3'-phosphate
  modified_base 12: mod_base = OTHER; note = cytidine-3'-phosphate
  modified_base 13: mod_base = OTHER; note = adenosine-3'-phosphate
  modified_base 14: mod_base = OTHER; note = cytidine-3'-phosphate
  modified_base 15: mod_base = OTHER; note = guanosine-3'-phosphate
  modified_base 16: mod_base = OTHER; note = guanosine-3'-phosphate
  modified_base 17: mod_base = OTHER; note = adenosine-3'-phosphate
  modified_base 18: mod_base = OTHER; note = uridine-3'-phosphate
  modified_base 19: mod_base = OTHER; note = adenosine-3'-phosphate
  misc_feature 1..19: note = RNA
  misc_feature 20..21: note = DNA
tagcaggaaaccacggatatt

SEQ ID NO: 2307 - DNA, 21 bp, synthetic construct
  source 1..21: mol_type = other DNA
  modified_base 1: mod_base = OTHER; note = uridine-3'-phosphate
  modified_base 2: mod_base = OTHER; note = uridine-3'-phosphate
  modified_base 3: mod_base = OTHER; note = guanosine-3'-phosphate
  modified_base 4: mod_base = OTHER; note = guanosine-3'-phosphate
  modified_base 5: mod_base = OTHER; note = adenosine-3'-phosphate
  modified_base 6: mod_base = OTHER; note = guanosine-3'-phosphate
  modified_base 7: mod_base = OTHER; note = guanosine-3'-phosphate
  modified_base 8: mod_base = OTHER; note = uridine-3'-phosphate
  modified_base 9: mod_base = OTHER; note = adenosine-3'-phosphate
  modified_base 10: mod_base = OTHER; note = guanosine-3'-phosphate
  modified_base 11: mod_base = OTHER; note = cytidine-3'-phosphate
  modified_base 12: mod_base = OTHER; note = adenosine-3'-phosphate
  modified_base 13: mod_base = OTHER; note = guanosine-3'-phosphate
  modified_base 14: mod_base = OTHER; note = guanosine-3'-phosphate
  modified_base 15: mod_base = OTHER; note = adenosine-3'-phosphate
  modified_base 16: mod_base = OTHER; note = adenosine-3'-phosphate
  modified_base 17: mod_base = OTHER; note = adenosine-3'-phosphate
  modified_base 18: mod_base = OTHER; note = cytidine-3'-phosphate
  modified_base 19: mod_base = OTHER; note = cytidine-3'-phosphate
  misc_feature 1..19: note = RNA
  misc_feature 20..21: note = DNA
ttggaggtagcaggaaacctt

SEQ ID NO: 2308 - DNA, 21 bp, synthetic construct
  source 1..21: mol_type = other DNA
  modified_base 1: mod_base = OTHER; note = adenosine-3'-phosphate
  modified_base 2: mod_base = OTHER; note = adenosine-3'-phosphate
  modified_base 3: mod_base = OTHER; note = adenosine-3'-phosphate
  modified_base 4: mod_base = OTHER; note = guanosine-3'-phosphate
  modified_base 5: mod_base = OTHER; note = guanosine-3'-phosphate
  modified_base 6: mod_base = OTHER; note = cytidine-3'-phosphate
  modified_base 7: mod_base = OTHER; note = cytidine-3'-phosphate
  modified_base 8: mod_base = OTHER; note = cytidine-3'-phosphate
  modified_base 9: mod_base = OTHER; note = adenosine-3'-phosphate
  modified_base 10: mod_base = OTHER; note = uridine-3'-phosphate
  modified_base 11: mod_base = OTHER; note = guanosine-3'-phosphate
  modified_base 12: mod_base = OTHER; note = guanosine-3'-phosphate
  modified_base 13: mod_base = OTHER; note = uridine-3'-phosphate
  modified_base 14: mod_base = OTHER; note = uridine-3'-phosphate
  modified_base 15: mod_base = OTHER; note = guanosine-3'-phosphate
  modified_base 16: mod_base = OTHER; note = guanosine-3'-phosphate
  modified_base 17: mod_base = OTHER; note = adenosine-3'-phosphate
  modified_base 18: mod_base = OTHER; note = guanosine-3'-phosphate
  modified_base 19: mod_base = OTHER; note = guanosine-3'-phosphate
  misc_feature 1..19: note = RNA
  misc_feature 20..21: note = DNA
aaaggcccatggttggaggtt

SEQ ID NO: 2309 - DNA, 21 bp, synthetic construct
  source 1..21: mol_type = other DNA
  modified_base 1: mod_base = OTHER; note = adenosine-3'-phosphate
  modified_base 2: mod_base = OTHER; note = adenosine-3'-phosphate
  modified_base 3: mod_base = OTHER; note = guanosine-3'-phosphate
  modified_base 4: mod_base = OTHER; note = uridine-3'-phosphate
  modified_base 5: mod_base = OTHER; note = adenosine-3'-phosphate
  modified_base 6: mod_base = OTHER; note = uridine-3'-phosphate
  modified_base 7: mod_base = OTHER; note = uridine-3'-phosphate
  modified_base 8: mod_base = OTHER; note = cytidine-3'-phosphate
  modified_base 9: mod_base = OTHER; note = cytidine-3'-phosphate
  modified_base 10: mod_base = OTHER; note = cytidine-3'-phosphate
  modified_base 11: mod_base = OTHER; note = adenosine-3'-phosphate
  modified_base 12: mod_base = OTHER; note = adenosine-3'-phosphate
  modified_base 13: mod_base = OTHER; note = adenosine-3'-phosphate
  modified_base 14: mod_base = OTHER; note = adenosine-3'-phosphate
  modified_base 15: mod_base = OTHER; note = guanosine-3'-phosphate
  modified_base 16: mod_base = OTHER; note = guanosine-3'-phosphate
  modified_base 17: mod_base = OTHER; note = cytidine-3'-phosphate
  modified_base 18: mod_base = OTHER; note = cytidine-3'-phosphate
  modified_base 19: mod_base = OTHER; note = cytidine-3'-phosphate
  misc_feature 1..19: note = RNA
  misc_feature 20..21: note = DNA
aagtattcccaaaaggccctt

SEQ ID NO: 2310 - DNA, 21 bp, synthetic construct
  source 1..21: mol_type = other DNA
  modified_base 1: mod_base = OTHER; note = uridine-3'-phosphate
  modified_base 2: mod_base = OTHER; note = uridine-3'-phosphate
  modified_base 3: mod_base = OTHER; note = adenosine-3'-phosphate
  modified_base 4: mod_base = OTHER; note = adenosine-3'-phosphate
  modified_base 5: mod_base = OTHER; note = adenosine-3'-phosphate
  modified_base 6: mod_base = OTHER; note = adenosine-3'-phosphate
  modified_base 7: mod_base = OTHER; note = adenosine-3'-phosphate
  modified_base 8: mod_base = OTHER; note = adenosine-3'-phosphate
  modified_base 9: mod_base = OTHER; note = cytidine-3'-phosphate
  modified_base 10: mod_base = OTHER; note = adenosine-3'-phosphate
  modified_base 11: mod_base = OTHER; note = adenosine-3'-phosphate
  modified_base 12: mod_base = OTHER; note = adenosine-3'-phosphate
  modified_base 13: mod_base = OTHER; note = guanosine-3'-phosphate
  modified_base 14: mod_base = OTHER; note = uridine-3'-phosphate
  modified_base 15: mod_base = OTHER; note = adenosine-3'-phosphate
  modified_base 16: mod_base = OTHER; note = uridine-3'-phosphate
  modified_base 17: mod_base = OTHER; note = uridine-3'-phosphate
  modified_base 18: mod_base = OTHER; note = cytidine-3'-phosphate
  modified_base 19: mod_base = OTHER; note = cytidine-3'-phosphate
  misc_feature 1..19: note = RNA
  misc_feature 20..21: note = DNA
ttaaaaaacaaagtattcctt

SEQ ID NO: 2311 - DNA, 21 bp, synthetic construct
  source 1..21: mol_type = other DNA
  modified_base 1: mod_base = OTHER; note = guanosine-3'-phosphate
  modified_base 2: mod_base = OTHER; note = guanosine-3'-phosphate
  modified_base 3: mod_base = OTHER; note = adenosine-3'-phosphate
  modified_base 4: mod_base = OTHER; note = adenosine-3'-phosphate
  modified_base 5: mod_base = OTHER; note = guanosine-3'-phosphate
  modified_base 6: mod_base = OTHER; note = adenosine-3'-phosphate
  modified_base 7: mod_base = OTHER; note = uridine-3'-phosphate
  modified_base 8: mod_base = OTHER; note = uridine-3'-phosphate
  modified_base 9: mod_base = OTHER; note = adenosine-3'-phosphate
  modified_base 10: mod_base = OTHER; note = adenosine-3'-phosphate
  modified_base 11: mod_base = OTHER; note = adenosine-3'-phosphate
  modified_base 12: mod_base = OTHER; note = adenosine-3'-phosphate
  modified_base 13: mod_base = OTHER; note = adenosine-3'-phosphate
  modified_base 14: mod_base = OTHER; note = adenosine-3'-phosphate
  modified_base 15: mod_base = OTHER; note = cytidine-3'-phosphate
  modified_base 16: mod_base = OTHER; note = adenosine-3'-phosphate
  modified_base 17: mod_base = OTHER; note = adenosine-3'-phosphate
  modified_base 18: mod_base = OTHER; note = adenosine-3'-phosphate
  modified_base 19: mod_base = OTHER; note = guanosine-3'-phosphate
  misc_feature 1..19: note = RNA
  misc_feature 20..21: note = DNA
ggaagattaaaaaacaaagtt

SEQ ID NO: 2312 - DNA, 21 bp, synthetic construct
  source 1..21: mol_type = other DNA
  modified_base 1: mod_base = OTHER; note = cytidine-3'-phosphate
  modified_base 2: mod_base = OTHER; note = cytidine-3'-phosphate
  modified_base 3: mod_base = OTHER; note = adenosine-3'-phosphate
  modified_base 4: mod_base = OTHER; note = guanosine-3'-phosphate
  modified_base 5: mod_base = OTHER; note = guanosine-3'-phosphate
  modified_base 6: mod_base = OTHER; note = uridine-3'-phosphate
  modified_base 7: mod_base = OTHER; note = uridine-3'-phosphate
  modified_base 8: mod_base = OTHER; note = uridine-3'-phosphate
  modified_base 9: mod_base = OTHER; note = uridine-3'-phosphate
  modified_base 10: mod_base = OTHER; note = cytidine-3'-phosphate
  modified_base 11: mod_base = OTHER; note = cytidine-3'-phosphate
  modified_base 12: mod_base = OTHER; note = cytidine-3'-phosphate
  modified_base 13: mod_base = OTHER; note = cytidine-3'-phosphate
  modified_base 14: mod_base = OTHER; note = adenosine-3'-phosphate
  modified_base 15: mod_base = OTHER; note = guanosine-3'-phosphate
  modified_base 16: mod_base = OTHER; note = guanosine-3'-phosphate
  modified_base 17: mod_base = OTHER; note = adenosine-3'-phosphate
  modified_base 18: mod_base = OTHER; note = adenosine-3'-phosphate
  modified_base 19: mod_base = OTHER; note = guanosine-3'-phosphate
  misc_feature 1..19: note = RNA
  misc_feature 20..21: note = DNA
ccaggttttccccaggaagtt

SEQ ID NO: 2313 - DNA, 21 bp, synthetic construct
  source 1..21: mol_type = other DNA
  modified_base 1: mod_base = OTHER; note = uridine-3'-phosphate
  modified_base 2: mod_base = OTHER; note = cytidine-3'-phosphate
  modified_base 3: mod_base = OTHER; note = cytidine-3'-phosphate
  modified_base 4: mod_base = OTHER; note = uridine-3'-phosphate
  modified_base 5: mod_base = OTHER; note = guanosine-3'-phosphate
  modified_base 6: mod_base = OTHER; note = uridine-3'-phosphate
  modified_base 7: mod_base = OTHER; note = cytidine-3'-phosphate
  modified_base 8: mod_base = OTHER; note = cytidine-3'-phosphate
  modified_base 9: mod_base = OTHER; note = cytidine-3'-phosphate
  modified_base 10: mod_base = OTHER; note = cytidine-3'-phosphate
  modified_base 11: mod_base = OTHER; note = adenosine-3'-phosphate
  modified_base 12: mod_base = OTHER; note = guanosine-3'-phosphate
  modified_base 13: mod_base = OTHER; note = guanosine-3'-phosphate
  modified_base 14: mod_base = OTHER; note = uridine-3'-phosphate
  modified_base 15: mod_base = OTHER; note = uridine-3'-phosphate
  modified_base 16: mod_base = OTHER; note = uridine-3'-phosphate
  modified_base 17: mod_base = OTHER; note = uridine-3'-phosphate
  modified_base 18: mod_base = OTHER; note = cytidine-3'-phosphate
  modified_base 19: mod_base = OTHER; note = cytidine-3'-phosphate
  misc_feature 1..19: note = RNA
  misc_feature 20..21: note = DNA
tcctgtccccaggttttcctt

SEQ ID NO: 2314 - DNA, 21 bp, synthetic construct
  source 1..21: mol_type = other DNA
  modified_base 1: mod_base = OTHER; note = adenosine-3'-phosphate
  modified_base 2: mod_base = OTHER; note = uridine-3'-phosphate
  modified_base 3: mod_base = OTHER; note = adenosine-3'-phosphate
  modified_base 4: mod_base = OTHER; note = uridine-3'-phosphate
  modified_base 5: mod_base = OTHER; note = guanosine-3'-phosphate
  modified_base 6: mod_base = OTHER; note = uridine-3'-phosphate
  modified_base 7: mod_base = OTHER; note = uridine-3'-phosphate
  modified_base 8: mod_base = OTHER; note = uridine-3'-phosphate
  modified_base 9: mod_base = OTHER; note = guanosine-3'-phosphate
  modified_base 10: mod_base = OTHER; note = cytidine-3'-phosphate
  modified_base 11: mod_base = OTHER; note = uridine-3'-phosphate
  modified_base 12: mod_base = OTHER; note = cytidine-3'-phosphate
  modified_base 13: mod_base = OTHER; note = cytidine-3'-phosphate
  modified_base 14: mod_base = OTHER; note = uridine-3'-phosphate
  modified_base 15: mod_base = OTHER; note = guanosine-3'-phosphate
  modified_base 16: mod_base = OTHER; note = uridine-3'-phosphate
  modified_base 17: mod_base = OTHER; note = cytidine-3'-phosphate
  modified_base 18: mod_base = OTHER; note = cytidine-3'-phosphate
  modified_base 19: mod_base = OTHER; note = cytidine-3'-phosphate
  misc_feature 1..19: note = RNA
  misc_feature 20..21: note = DNA
atatgtttgctcctgtccctt

SEQ ID NO: 2315 - DNA, 21 bp, synthetic construct
  source 1..21: mol_type = other DNA
  modified_base 1: mod_base = OTHER; note = cytidine-3'-phosphate
  modified_base 2: mod_base = OTHER; note = uridine-3'-phosphate
  modified_base 3: mod_base = OTHER; note = guanosine-3'-phosphate
  modified_base 4: mod_base = OTHER; note = adenosine-3'-phosphate
  modified_base 5: mod_base = OTHER; note = adenosine-3'-phosphate
  modified_base 6: mod_base = OTHER; note = adenosine-3'-phosphate
  modified_base 7: mod_base = OTHER; note = uridine-3'-phosphate
  modified_base 8: mod_base = OTHER; note = guanosine-3'-phosphate
  modified_base 9: mod_base = OTHER; note = adenosine-3'-phosphate
  modified_base 10: mod_base = OTHER; note = cytidine-3'-phosphate
  modified_base 11: mod_base = OTHER; note = adenosine-3'-phosphate
  modified_base 12: mod_base = OTHER; note = uridine-3'-phosphate
  modified_base 13: mod_base = OTHER; note = adenosine-3'-phosphate
  modified_base 14: mod_base = OTHER; note = uridine-3'-phosphate
  modified_base 15: mod_base = OTHER; note = guanosine-3'-phosphate
  modified_base 16: mod_base = OTHER; note = uridine-3'-phosphate
  modified_base 17: mod_base = OTHER; note = uridine-3'-phosphate
  modified_base 18: mod_base = OTHER; note = uridine-3'-phosphate
  modified_base 19: mod_base = OTHER; note = guanosine-3'-phosphate
  misc_feature 1..19: note = RNA
  misc_feature 20..21: note = DNA
ctgaaatgacatatgtttgtt

SEQ ID NO: 2316 - DNA, 21 bp, synthetic construct
  source 1..21: mol_type = other DNA
  modified_base 1: mod_base = OTHER; note = uridine-3'-phosphate
  modified_base 2: mod_base = OTHER; note = adenosine-3'-phosphate
  modified_base 3: mod_base = OTHER; note = uridine-3'-phosphate
  modified_base 4: mod_base = OTHER; note = uridine-3'-phosphate
  modified_base 5: mod_base = OTHER; note = uridine-3'-phosphate
  modified_base 6: mod_base = OTHER; note = uridine-3'-phosphate
  modified_base 7: mod_base = OTHER; note = uridine-3'-phosphate
  modified_base 8: mod_base = OTHER; note = guanosine-3'-phosphate
  modified_base 9: mod_base = OTHER; note = guanosine-3'-phosphate
  modified_base 10: mod_base = OTHER; note = uridine-3'-phosphate
  modified_base 11: mod_base = OTHER; note = guanosine-3'-phosphate
  modified_base 12: mod_base = OTHER; note = cytidine-3'-phosphate
  modified_base 13: mod_base = OTHER; note = uridine-3'-phosphate
  modified_base 14: mod_base = OTHER; note = guanosine-3'-phosphate
  modified_base 15: mod_base = OTHER; note = adenosine-3'-phosphate
  modified_base 16: mod_base = OTHER; note = adenosine-3'-phosphate
  modified_base 17: mod_base = OTHER; note = adenosine-3'-phosphate
  modified_base 18: mod_base = OTHER; note = uridine-3'-phosphate
  modified_base 19: mod_base = OTHER; note = guanosine-3'-phosphate
  misc_feature 1..19: note = RNA
  misc_feature 20..21: note = DNA
tatttttggtgctgaaatgtt

SEQ ID NO: 2317 - DNA, 21 bp, synthetic construct
  source 1..21: mol_type = other DNA
  modified_base 1: mod_base = OTHER; note = cytidine-3'-phosphate
  modified_base 2: mod_base = OTHER; note = adenosine-3'-phosphate
  modified_base 3: mod_base = OTHER; note = cytidine-3'-phosphate
  modified_base 4: mod_base = OTHER; note = guanosine-3'-phosphate
  modified_base 5: mod_base = OTHER; note = guanosine-3'-phosphate
  modified_base 6: mod_base = OTHER; note = adenosine-3'-phosphate
  modified_base 7: mod_base = OTHER; note = adenosine-3'-phosphate
  modified_base 8: mod_base = OTHER; note = uridine-3'-phosphate
  modified_base 9: mod_base = OTHER; note = adenosine-3'-phosphate
  modified_base 10: mod_base = OTHER; note = uridine-3'-phosphate
  modified_base 11: mod_base = OTHER; note = uridine-3'-phosphate
  modified_base 12: mod_base = OTHER; note = uridine-3'-phosphate
  modified_base 13: mod_base = OTHER; note = uridine-3'-phosphate
  modified_base 14: mod_base = OTHER; note = uridine-3'-phosphate
  modified_base 15: mod_base = OTHER; note = guanosine-3'-phosphate
  modified_base 16: mod_base = OTHER; note = guanosine-3'-phosphate
  modified_base 17: mod_base = OTHER; note = uridine-3'-phosphate
  modified_base 18: mod_base = OTHER; note = guanosine-3'-phosphate
  modified_base 19: mod_base = OTHER; note = cytidine-3'-phosphate
  misc_feature 1..19: note = RNA
  misc_feature 20..21: note = DNA
cacggaatatttttggtgctt

SEQ ID NO: 2318 - DNA, 21 bp, synthetic construct
  source 1..21: mol_type = other DNA
  modified_base 1: mod_base = OTHER; note = uridine-3'-phosphate
  modified_base 2: mod_base = OTHER; note = uridine-3'-phosphate
  modified_base 3: mod_base = OTHER; note = cytidine-3'-phosphate
  modified_base 4: mod_base = OTHER; note = adenosine-3'-phosphate
  modified_base 5: mod_base = OTHER; note = guanosine-3'-phosphate
  modified_base 6: mod_base = OTHER; note = adenosine-3'-phosphate
  modified_base 7: mod_base = OTHER; note = uridine-3'-phosphate
  modified_base 8: mod_base = OTHER; note = guanosine-3'-phosphate
  modified_base 9: mod_base = OTHER; note = cytidine-3'-phosphate
  modified_base 10: mod_base = OTHER; note = uridine-3'-phosphate
  modified_base 11: mod_base = OTHER; note = cytidine-3'-phosphate
  modified_base 12: mod_base = OTHER; note = cytidine-3'-phosphate
  modified_base 13: mod_base = OTHER; note = adenosine-3'-phosphate
  modified_base 14: mod_base = OTHER; note = adenosine-3'-phosphate
  modified_base 15: mod_base = OTHER; note = cytidine-3'-phosphate
  modified_base 16: mod_base = OTHER; note = adenosine-3'-phosphate
  modified_base 17: mod_base = OTHER; note = cytidine-3'-phosphate
  modified_base 18: mod_base = OTHER; note = guanosine-3'-phosphate
  modified_base 19: mod_base = OTHER; note = guanosine-3'-phosphate
  misc_feature 1..19: note = RNA
  misc_feature 20..21: note = DNA
ttcagatgctccaacacggtt

SEQ ID NO: 2319 - DNA, 21 bp, synthetic construct
  source 1..21: mol_type = other DNA
  modified_base 1: mod_base = OTHER; note = cytidine-3'-phosphate
  modified_base 2: mod_base = OTHER; note = adenosine-3'-phosphate
  modified_base 3: mod_base = OTHER; note = adenosine-3'-phosphate
  modified_base 4: mod_base = OTHER; note = uridine-3'-phosphate
  modified_base 5: mod_base = OTHER; note = adenosine-3'-phosphate
  modified_base 6: mod_base = OTHER; note = uridine-3'-phosphate
  modified_base 7: mod_base = OTHER; note = uridine-3'-phosphate
  modified_base 8: mod_base = OTHER; note = uridine-3'-phosphate
  modified_base 9: mod_base = OTHER; note = uridine-3'-phosphate
  modified_base 10: mod_base = OTHER; note = cytidine-3'-phosphate
  modified_base 11: mod_base = OTHER; note = adenosine-3'-phosphate
  modified_base 12: mod_base = OTHER; note = guanosine-3'-phosphate
  modified_base 13: mod_base = OTHER; note = adenosine-3'-phosphate
  modified_base 14: mod_base = OTHER; note = uridine-3'-phosphate
  modified_base 15: mod_base = OTHER; note = guanosine-3'-phosphate
  modified_base 16: mod_base = OTHER; note = cytidine-3'-phosphate
  modified_base 17: mod_base = OTHER; note = uridine-3'-phosphate
  modified_base 18: mod_base = OTHER; note = cytidine-3'-phosphate
  modified_base 19: mod_base = OTHER; note = cytidine-3'-phosphate
  misc_feature 1..19: note = RNA
  misc_feature 20..21: note = DNA
caatattttcagatgctcctt

SEQ ID NO: 2320 - DNA, 21 bp, synthetic construct
  source 1..21: mol_type = other DNA
  modified_base 1: mod_base = OTHER; note = cytidine-3'-phosphate
  modified_base 2: mod_base = OTHER; note = uridine-3'-phosphate
  modified_base 3: mod_base = OTHER; note = uridine-3'-phosphate
  modified_base 4: mod_base = OTHER; note = guanosine-3'-phosphate
  modified_base 5: mod_base = OTHER; note = adenosine-3'-phosphate
  modified_base 6: mod_base = OTHER; note = adenosine-3'-phosphate
  modified_base 7: mod_base = OTHER; note = uridine-3'-phosphate
  modified_base 8: mod_base = OTHER; note = cytidine-3'-phosphate
  modified_base 9: mod_base = OTHER; note = adenosine-3'-phosphate
  modified_base 10: mod_base = OTHER; note = cytidine-3'-phosphate
  modified_base 11: mod_base = OTHER; note = adenosine-3'-phosphate
  modified_base 12: mod_base = OTHER; note = adenosine-3'-phosphate
  modified_base 13: mod_base = OTHER; note = uridine-3'-phosphate
  modified_base 14: mod_base = OTHER; note = adenosine-3'-phosphate
  modified_base 15: mod_base = OTHER; note = uridine-3'-phosphate
  modified_base 16: mod_base = OTHER; note = uridine-3'-phosphate
  modified_base 17: mod_base = OTHER; note = uridine-3'-phosphate
  modified_base 18: mod_base = OTHER; note = uridine-3'-phosphate
  modified_base 19: mod_base = OTHER; note = cytidine-3'-phosphate
  misc_feature 1..19: note = RNA
  misc_feature 20..21: note = DNA
cttgaatcacaatattttctt

SEQ ID NO: 2321 - DNA, 21 bp, synthetic construct
  source 1..21: mol_type = other DNA
  modified_base 1: mod_base = OTHER; note = guanosine-3'-phosphate
  modified_base 2: mod_base = OTHER; note = uridine-3'-phosphate
  modified_base 3: mod_base = OTHER; note = adenosine-3'-phosphate
  modified_base 4: mod_base = OTHER; note = uridine-3'-phosphate
  modified_base 5: mod_base = OTHER; note = cytidine-3'-phosphate
  modified_base 6: mod_base = OTHER; note = cytidine-3'-phosphate
  modified_base 7: mod_base = OTHER; note = adenosine-3'-phosphate
  modified_base 8: mod_base = OTHER; note = uridine-3'-phosphate
  modified_base 9: mod_base = OTHER; note = adenosine-3'-phosphate
  modified_base 10: mod_base = OTHER; note = adenosine-3'-phosphate
  modified_base 11: mod_base = OTHER; note = adenosine-3'-phosphate
  modified_base 12: mod_base = OTHER; note = cytidine-3'-phosphate
  modified_base 13: mod_base = OTHER; note = uridine-3'-phosphate
  modified_base 14: mod_base = OTHER; note = uridine-3'-phosphate
  modified_base 15: mod_base = OTHER; note = guanosine-3'-phosphate
  modified_base 16: mod_base = OTHER; note = adenosine-3'-phosphate
  modified_base 17: mod_base = OTHER; note = adenosine-3'-phosphate
  modified_base 18: mod_base = OTHER; note = uridine-3'-phosphate
  modified_base 19: mod_base = OTHER; note = cytidine-3'-phosphate
  misc_feature 1..19: note = RNA
  misc_feature 20..21: note = DNA
gtatccataaacttgaatctt

SEQ ID NO: 2322 - DNA, 21 bp, synthetic construct
  source 1..21: mol_type = other DNA
  modified_base 1: mod_base = OTHER; note = cytidine-3'-phosphate
  modified_base 2: mod_base = OTHER; note = adenosine-3'-phosphate
  modified_base 3: mod_base = OTHER; note = adenosine-3'-phosphate
  modified_base 4: mod_base = OTHER; note = adenosine-3'-phosphate
  modified_base 5: mod_base = OTHER; note = uridine-3'-phosphate
  modified_base 6: mod_base = OTHER; note = guanosine-3'-phosphate
  modified_base 7: mod_base = OTHER; note = cytidine-3'-phosphate
  modified_base 8: mod_base = OTHER; note = uridine-3'-phosphate
  modified_base 9: mod_base = OTHER; note = uridine-3'-phosphate
  modified_base 10: mod_base = OTHER; note = cytidine-3'-phosphate
  modified_base 11: mod_base = OTHER; note = adenosine-3'-phosphate
  modified_base 12: mod_base = OTHER; note = guanosine-3'-phosphate
  modified_base 13: mod_base = OTHER; note = uridine-3'-phosphate
  modified_base 14: mod_base = OTHER; note = guanosine-3'-phosphate
  modified_base 15: mod_base = OTHER; note = uridine-3'-phosphate
  modified_base 16: mod_base = OTHER; note = adenosine-3'-phosphate
  modified_base 17: mod_base = OTHER; note = uridine-3'-phosphate
  modified_base 18: mod_base = OTHER; note = cytidine-3'-phosphate
  modified_base 19: mod_base = OTHER; note = cytidine-3'-phosphate
  misc_feature 1..19: note = RNA
  misc_feature 20..21: note = DNA
caaatgcttcagtgtatcctt

SEQ ID NO: 2323 - DNA, 21 bp, synthetic construct
  source 1..21: mol_type = other DNA
  modified_base 1: mod_base = OTHER; note = uridine-3'-phosphate
  modified_base 2: mod_base = OTHER; note = uridine-3'-phosphate
  modified_base 3: mod_base = OTHER; note = guanosine-3'-phosphate
  modified_base 4: mod_base = OTHER; note = uridine-3'-phosphate
  modified_base 5: mod_base = OTHER; note = uridine-3'-phosphate
  modified_base 6: mod_base = OTHER; note = guanosine-3'-phosphate
  modified_base 7: mod_base = OTHER; note = cytidine-3'-phosphate
  modified_base 8: mod_base = OTHER; note = adenosine-3'-phosphate
  modified_base 9: mod_base = OTHER; note = uridine-3'-phosphate
  modified_base 10: mod_base = OTHER; note = cytidine-3'-phosphate
  modified_base 11: mod_base = OTHER; note = adenosine-3'-phosphate
  modified_base 12: mod_base = OTHER; note = adenosine-3'-phosphate
  modified_base 13: mod_base = OTHER; note = adenosine-3'-phosphate
  modified_base 14: mod_base = OTHER; note = uridine-3'-phosphate
  modified_base 15: mod_base = OTHER; note = guanosine-3'-phosphate
  modified_base 16: mod_base = OTHER; note = cytidine-3'-phosphate
  modified_base 17: mod_base = OTHER; note = uridine-3'-phosphate
  modified_base 18: mod_base = OTHER; note = uridine-3'-phosphate
  modified_base 19: mod_base = OTHER; note = cytidine-3'-phosphate
  misc_feature 1..19: note = RNA
  misc_feature 20..21: note = DNA
ttgttgcatcaaatgcttctt

SEQ ID NO: 2324 - DNA, 21 bp, synthetic construct
  source 1..21: mol_type = other DNA
  modified_base 1: mod_base = OTHER; note = uridine-3'-phosphate
  modified_base 2: mod_base = OTHER; note = uridine-3'-phosphate
  modified_base 3: mod_base = OTHER; note = uridine-3'-phosphate
  modified_base 4: mod_base = OTHER; note = adenosine-3'-phosphate
  modified_base 5: mod_base = OTHER; note = adenosine-3'-phosphate
  modified_base 6: mod_base = OTHER; note = uridine-3'-phosphate
  modified_base 7: mod_base = OTHER; note = adenosine-3'-phosphate
  modified_base 8: mod_base = OTHER; note = guanosine-3'-phosphate
  modified_base 9: mod_base = OTHER; note = adenosine-3'-phosphate
  modified_base 10: mod_base = OTHER; note = guanosine-3'-phosphate
  modified_base 11: mod_base = OTHER; note = adenosine-3'-phosphate
  modified_base 12: mod_base = OTHER; note = uridine-3'-phosphate
  modified_base 13: mod_base = OTHER; note = uridine-3'-phosphate
  modified_base 14: mod_base = OTHER; note = guanosine-3'-phosphate
  modified_base 15: mod_base = OTHER; note = uridine-3'-phosphate
  modified_base 16: mod_base = OTHER; note = uridine-3'-phosphate
  modified_base 17: mod_base = OTHER; note = guanosine-3'-phosphate
  modified_base 18: mod_base = OTHER; note = cytidine-3'-phosphate
  modified_base 19: mod_base = OTHER; note = adenosine-3'-phosphate
  misc_feature 1..19: note = RNA
  misc_feature 20..21: note = DNA
tttaatagagattgttgcatt

SEQ ID NO: 2325 - DNA, 21 bp, synthetic construct
  source 1..21: mol_type = other DNA
  modified_base 1: mod_base = OTHER; note = adenosine-3'-phosphate
  modified_base 2: mod_base = OTHER; note = uridine-3'-phosphate
  modified_base 3: mod_base = OTHER; note = adenosine-3'-phosphate
  modified_base 4: mod_base = OTHER; note = adenosine-3'-phosphate
  modified_base 5: mod_base = OTHER; note = cytidine-3'-phosphate
  modified_base 6: mod_base = OTHER; note = uridine-3'-phosphate
  modified_base 7: mod_base = OTHER; note = uridine-3'-phosphate
  modified_base 8: mod_base = OTHER; note = uridine-3'-phosphate
  modified_base 9: mod_base = OTHER; note = uridine-3'-phosphate
  modified_base 10: mod_base = OTHER; note = adenosine-3'-phosphate
  modified_base 11: mod_base = OTHER; note = adenosine-3'-phosphate
  modified_base 12: mod_base = OTHER; note = uridine-3'-phosphate
  modified_base 13: mod_base = OTHER; note = adenosine-3'-phosphate
  modified_base 14: mod_base = OTHER; note = guanosine-3'-phosphate
  modified_base 15: mod_base = OTHER; note = adenosine-3'-phosphate
  modified_base 16: mod_base = OTHER; note = guanosine-3'-phosphate
  modified_base 17: mod_base = OTHER; note = adenosine-3'-phosphate
  modified_base 18: mod_base = OTHER; note = uridine-3'-phosphate
  modified_base 19: mod_base = OTHER; note = uridine-3'-phosphate
  misc_feature 1..19: note = RNA
  misc_feature 20..21: note = DNA
ataacttttaatagagatttt

SEQ ID NO: 2326 - DNA, 21 bp, synthetic construct
  source 1..21: mol_type = other DNA
  modified_base 1: mod_base = OTHER; note = uridine-3'-phosphate
  modified_base 2: mod_base = OTHER; note = uridine-3'-phosphate
  modified_base 3: mod_base = OTHER; note = uridine-3'-phosphate
  modified_base 4: mod_base = OTHER; note = uridine-3'-phosphate
  modified_base 5: mod_base = OTHER; note = uridine-3'-phosphate
  modified_base 6: mod_base = OTHER; note = uridine-3'-phosphate
  modified_base 7: mod_base = OTHER; note = adenosine-3'-phosphate
  modified_base 8: mod_base = OTHER; note = uridine-3'-phosphate
  modified_base 9: mod_base = OTHER; note = cytidine-3'-phosphate
  modified_base 10: mod_base = OTHER; note = adenosine-3'-phosphate
  modified_base 11: mod_base = OTHER; note = guanosine-3'-phosphate
  modified_base 12: mod_base = OTHER; note = guanosine-3'-phosphate
  modified_base 13: mod_base = OTHER; note = adenosine-3'-phosphate
  modified_base 14: mod_base = OTHER; note = uridine-3'-phosphate
  modified_base 15: mod_base = OTHER; note = adenosine-3'-phosphate
  modified_base 16: mod_base = OTHER; note = adenosine-3'-phosphate
  modified_base 17: mod_base = OTHER; note = cytidine-3'-phosphate
  modified_base 18: mod_base = OTHER; note = uridine-3'-phosphate
  modified_base 19: mod_base = OTHER; note = uridine-3'-phosphate
  misc_feature 1..19: note = RNA
  misc_feature 20..21: note = DNA
ttttttatcaggataactttt

SEQ ID NO: 2327 - DNA, 21 bp, synthetic construct
  source 1..21: mol_type = other DNA
  modified_base 1: mod_base = OTHER; note = uridine-3'-phosphate
  modified_base 2: mod_base = OTHER; note = adenosine-3'-phosphate
  modified_base 3: mod_base = OTHER; note = adenosine-3'-phosphate
  modified_base 4: mod_base = OTHER; note = cytidine-3'-phosphate
  modified_base 5: mod_base = OTHER; note = uridine-3'-phosphate
  modified_base 6: mod_base = OTHER; note = adenosine-3'-phosphate
  modified_base 7: mod_base = OTHER; note = adenosine-3'-phosphate
  modified_base 8: mod_base = OTHER; note = adenosine-3'-phosphate
  modified_base 9: mod_base = OTHER; note = uridine-3'-phosphate
  modified_base 10: mod_base = OTHER; note = uridine-3'-phosphate
  modified_base 11: mod_base = OTHER; note = uridine-3'-phosphate
  modified_base 12: mod_base = OTHER; note = uridine-3'-phosphate
  modified_base 13: mod_base = OTHER; note = uridine-3'-phosphate
  modified_base 14: mod_base = OTHER; note = uridine-3'-phosphate
  modified_base 15: mod_base = OTHER; note = adenosine-3'-phosphate
  modified_base 16: mod_base = OTHER; note = uridine-3'-phosphate
  modified_base 17: mod_base = OTHER; note = cytidine-3'-phosphate
  modified_base 18: mod_base = OTHER; note = adenosine-3'-phosphate
  modified_base 19: mod_base = OTHER; note = guanosine-3'-phosphate
  misc_feature 1..19: note = RNA
  misc_feature 20..21: note = DNA
taactaaattttttatcagtt

SEQ ID NO: 2328 - DNA, 21 bp, synthetic construct
  source 1..21: mol_type = other DNA
  modified_base 1: mod_base = OTHER; note = uridine-3'-phosphate
  modified_base 2: mod_base = OTHER; note = guanosine-3'-phosphate
  modified_base 3: mod_base = OTHER; note = guanosine-3'-phosphate
  modified_base 4: mod_base = OTHER; note = cytidine-3'-phosphate
  modified_base 5: mod_base = OTHER; note = cytidine-3'-phosphate
  modified_base 6: mod_base = OTHER; note = uridine-3'-phosphate
  modified_base 7: mod_base = OTHER; note = guanosine-3'-phosphate
  modified_base 8: mod_base = OTHER; note = adenosine-3'-phosphate
  modified_base 9: mod_base = OTHER; note = guanosine-3'-phosphate
  modified_base 10: mod_base = OTHER; note = guanosine-3'-phosphate
  modified_base 11: mod_base = OTHER; note = adenosine-3'-phosphate
  modified_base 12: mod_base = OTHER; note = guanosine-3'-phosphate
  modified_base 13: mod_base = OTHER; note = uridine-3'-phosphate
  modified_base 14: mod_base = OTHER; note = adenosine-3'-phosphate
  modified_base 15: mod_base = OTHER; note = adenosine-3'-phosphate
  modified_base 16: mod_base = OTHER; note = cytidine-3'-phosphate
  modified_base 17: mod_base = OTHER; note = uridine-3'-phosphate
  modified_base 18: mod_base = OTHER; note = adenosine-3'-phosphate
  modified_base 19: mod_base = OTHER; note = adenosine-3'-phosphate
  misc_feature 1..19: note = RNA
  misc_feature 20..21: note = DNA
tggcctgaggagtaactaatt

SEQ ID NO: 2329 - DNA, 21 bp, synthetic construct
  source 1..21: mol_type = other DNA
  modified_base 1: mod_base = OTHER; note = adenosine-3'-phosphate
  modified_base 2: mod_base = OTHER; note = adenosine-3'-phosphate
  modified_base 3: mod_base = OTHER; note = adenosine-3'-phosphate
  modified_base 4: mod_base = OTHER; note = uridine-3'-phosphate
  modified_base 5: mod_base = OTHER; note = guanosine-3'-phosphate
  modified_base 6: mod_base = OTHER; note = adenosine-3'-phosphate
  modified_base 7: mod_base = OTHER; note = adenosine-3'-phosphate
  modified_base 8: mod_base = OTHER; note = cytidine-3'-phosphate
  modified_base 9: mod_base = OTHER; note = adenosine-3'-phosphate
  modified_base 10: mod_base = OTHER; note = uridine-3'-phosphate
  modified_base 11: mod_base = OTHER; note = guanosine-3'-phosphate
  modified_base 12: mod_base = OTHER; note = guanosine-3'-phosphate
  modified_base 13: mod_base = OTHER; note = cytidine-3'-phosphate
  modified_base 14: mod_base = OTHER; note = cytidine-3'-phosphate
  modified_base 15: mod_base = OTHER; note = uridine-3'-phosphate
  modified_base 16: mod_base = OTHER; note = guanosine-3'-phosphate
  modified_base 17: mod_base = OTHER; note = adenosine-3'-phosphate
  modified_base 18: mod_base = OTHER; note = guanosine-3'-phosphate
  modified_base 19: mod_base = OTHER; note = guanosine-3'-phosphate
  misc_feature 1..19: note = RNA
  misc_feature 20..21: note = DNA
aaatgaacatggcctgaggtt

SEQ ID NO: 2330 - DNA, 21 bp, synthetic construct
  source 1..21: mol_type = other DNA
  modified_base 1: mod_base = OTHER; note = uridine-3'-phosphate
  modified_base 2: mod_base = OTHER; note = uridine-3'-phosphate
  modified_base 3: mod_base = OTHER; note = cytidine-3'-phosphate
  modified_base 4: mod_base = OTHER; note = uridine-3'-phosphate
  modified_base 5: mod_base = OTHER; note = cytidine-3'-phosphate
  modified_base 6: mod_base = OTHER; note = uridine-3'-phosphate
  modified_base 7: mod_base = OTHER; note = guanosine-3'-phosphate
  modified_base 8: mod_base = OTHER; note = adenosine-3'-phosphate
  modified_base 9: mod_base = OTHER; note = guanosine-3'-phosphate
  modified_base 10: mod_base = OTHER; note = guanosine-3'-phosphate
  modified_base 11: mod_base = OTHER; note = adenosine-3'-phosphate
  modified_base 12: mod_base = OTHER; note = uridine-3'-phosphate
  modified_base 13: mod_base = OTHER; note = adenosine-3'-phosphate
  modified_base 14: mod_base = OTHER; note = adenosine-3'-phosphate
  modified_base 15: mod_base = OTHER; note = adenosine-3'-phosphate
  modified_base 16: mod_base = OTHER; note = uridine-3'-phosphate
  modified_base 17: mod_base = OTHER; note = guanosine-3'-phosphate
  modified_base 18: mod_base = OTHER; note = adenosine-3'-phosphate
  modified_base 19: mod_base = OTHER; note = adenosine-3'-phosphate
  misc_feature 1..19: note = RNA
  misc_feature 20..21: note = DNA
ttctctgaggataaatgaatt

SEQ ID NO: 2331 - DNA, 21 bp, synthetic construct
  source 1..21: mol_type = other DNA
  modified_base 1: mod_base = OTHER; note = uridine-3'-phosphate
  modified_base 2: mod_base = OTHER; note = uridine-3'-phosphate
  modified_base 3: mod_base = OTHER; note = guanosine-3'-phosphate
  modified_base 4: mod_base = OTHER; note = guanosine-3'-phosphate
  modified_base 5: mod_base = OTHER; note = adenosine-3'-phosphate
  modified_base 6: mod_base = OTHER; note = adenosine-3'-phosphate
  modified_base 7: mod_base = OTHER; note = uridine-3'-phosphate
  modified_base 8: mod_base = OTHER; note = uridine-3'-phosphate
  modified_base 9: mod_base = OTHER; note = uridine-3'-phosphate
  modified_base 10: mod_base = OTHER; note = adenosine-3'-phosphate
  modified_base 11: mod_base = OTHER; note = uridine-3'-phosphate
  modified_base 12: mod_base = OTHER; note = uridine-3'-phosphate
  modified_base 13: mod_base = OTHER; note = cytidine-3'-phosphate
  modified_base 14: mod_base = OTHER; note = uridine-3'-phosphate
  modified_base 15: mod_base = OTHER; note = cytidine-3'-phosphate
  modified_base 16: mod_base = OTHER; note = uridine-3'-phosphate
  modified_base 17: mod_base = OTHER; note = guanosine-3'-phosphate
  modified_base 18: mod_base = OTHER; note = adenosine-3'-phosphate
  modified_base 19: mod_base = OTHER; note = guanosine-3'-phosphate
  misc_feature 1..19: note = RNA
  misc_feature 20..21: note = DNA
ttggaatttattctctgagtt

SEQ ID NO: 2332 - DNA, 21 bp, synthetic construct
  source 1..21: mol_type = other DNA
  modified_base 1: mod_base = OTHER; note = cytidine-3'-phosphate
  modified_base 2: mod_base = OTHER; note = adenosine-3'-phosphate
  modified_base 3: mod_base = OTHER; note = guanosine-3'-phosphate
  modified_base 4: mod_base = OTHER; note = adenosine-3'-phosphate
  modified_base 5: mod_base = OTHER; note = guanosine-3'-phosphate
  modified_base 6: mod_base = OTHER; note = uridine-3'-phosphate
  modified_base 7: mod_base = OTHER; note = uridine-3'-phosphate
  modified_base 8: mod_base = OTHER; note = uridine-3'-phosphate
  modified_base 9: mod_base = OTHER; note = uridine-3'-phosphate
  modified_base 10: mod_base = OTHER; note = guanosine-3'-phosphate
  modified_base 11: mod_base = OTHER; note = guanosine-3'-phosphate
  modified_base 12: mod_base = OTHER; note = adenosine-3'-phosphate
  modified_base 13: mod_base = OTHER; note = adenosine-3'-phosphate
  modified_base 14: mod_base = OTHER; note = uridine-3'-phosphate
  modified_base 15: mod_base = OTHER; note = uridine-3'-phosphate
  modified_base 16: mod_base = OTHER; note = uridine-3'-phosphate
  modified_base 17: mod_base = OTHER; note = adenosine-3'-phosphate
  modified_base 18: mod_base = OTHER; note = uridine-3'-phosphate
  modified_base 19: mod_base = OTHER; note = uridine-3'-phosphate
  misc_feature 1..19: note = RNA
  misc_feature 20..21: note = DNA
cagagttttggaatttatttt

SEQ ID NO: 2333 - DNA, 21 bp, synthetic construct
  source 1..21: mol_type = other DNA
  modified_base 1: mod_base = OTHER; note = uridine-3'-phosphate
  modified_base 2: mod_base = OTHER; note = adenosine-3'-phosphate
  modified_base 3: mod_base = OTHER; note = uridine-3'-phosphate
  modified_base 4: mod_base = OTHER; note = uridine-3'-phosphate
  modified_base 5: mod_base = OTHER; note = guanosine-3'-phosphate
  modified_base 6: mod_base = OTHER; note = uridine-3'-phosphate
  modified_base 7: mod_base = OTHER; note = uridine-3'-phosphate
  modified_base 8: mod_base = OTHER; note = adenosine-3'-phosphate
  modified_base 9: mod_base = OTHER; note = adenosine-3'-phosphate
  modified_base 10: mod_base = OTHER; note = guanosine-3'-phosphate
  modified_base 11: mod_base = OTHER; note = adenosine-3'-phosphate
  modified_base 12: mod_base = OTHER; note = uridine-3'-phosphate
  modified_base 13: mod_base = OTHER; note = uridine-3'-phosphate
  modified_base 14: mod_base = OTHER; note = guanosine-3'-phosphate
  modified_base 15: mod_base = OTHER; note = cytidine-3'-phosphate
  modified_base 16: mod_base = OTHER; note = adenosine-3'-phosphate
  modified_base 17: mod_base = OTHER; note = guanosine-3'-phosphate
  modified_base 18: mod_base = OTHER; note = adenosine-3'-phosphate
  modified_base 19: mod_base = OTHER; note = guanosine-3'-phosphate
  misc_feature 1..19: note = RNA
  misc_feature 20..21: note = DNA
tattgttaagattgcagagtt

SEQ ID NO: 2334 - DNA, 21 bp, synthetic construct
  source 1..21: mol_type = other DNA
  modified_base 1: mod_base = OTHER; note = uridine-3'-phosphate
  modified_base 2: mod_base = OTHER; note = uridine-3'-phosphate
  modified_base 3: mod_base = OTHER; note = uridine-3'-phosphate
  modified_base 4: mod_base = OTHER; note = uridine-3'-phosphate
  modified_base 5: mod_base = OTHER; note = guanosine-3'-phosphate
  modified_base 6: mod_base = OTHER; note = guanosine-3'-phosphate
  modified_base 7: mod_base = OTHER; note = uridine-3'-phosphate
  modified_base 8: mod_base = OTHER; note = uridine-3'-phosphate
  modified_base 9: mod_base = OTHER; note = guanosine-3'-phosphate
  modified_base 10: mod_base = OTHER; note = uridine-3'-phosphate
  modified_base 11: mod_base = OTHER; note = adenosine-3'-phosphate
  modified_base 12: mod_base = OTHER; note = uridine-3'-phosphate
  modified_base 13: mod_base = OTHER; note = uridine-3'-phosphate
  modified_base 14: mod_base = OTHER; note = guanosine-3'-phosphate
  modified_base 15: mod_base = OTHER; note = uridine-3'-phosphate
  modified_base 16: mod_base = OTHER; note = uridine-3'-phosphate
  modified_base 17: mod_base = OTHER; note = adenosine-3'-phosphate
  modified_base 18: mod_base = OTHER; note = adenosine-3'-phosphate
  modified_base 19: mod_base = OTHER; note = guanosine-3'-phosphate
  misc_feature 1..19: note = RNA
  misc_feature 20..21: note = DNA
ttttggttgtattgttaagtt

SEQ ID NO: 2335 - DNA, 21 bp, synthetic construct
  source 1..21: mol_type = other DNA
  modified_base 1: mod_base = OTHER; note = cytidine-3'-phosphate
  modified_base 2: mod_base = OTHER; note = adenosine-3'-phosphate
  modified_base 3: mod_base = OTHER; note = guanosine-3'-phosphate
  modified_base 4: mod_base = OTHER; note = guanosine-3'-phosphate
  modified_base 5: mod_base = OTHER; note = cytidine-3'-phosphate
  modified_base 6: mod_base = OTHER; note = adenosine-3'-phosphate
  modified_base 7: mod_base = OTHER; note = adenosine-3'-phosphate
  modified_base 8: mod_base = OTHER; note = uridine-3'-phosphate
  modified_base 9: mod_base = OTHER; note = uridine-3'-phosphate
  modified_base 10: mod_base = OTHER; note = guanosine-3'-phosphate
  modified_base 11: mod_base = OTHER; note = uridine-3'-phosphate
  modified_base 12: mod_base = OTHER; note = uridine-3'-phosphate
  modified_base 13: mod_base = OTHER; note = uridine-3'-phosphate
  modified_base 14: mod_base = OTHER; note = uridine-3'-phosphate
  modified_base 15: mod_base = OTHER; note = guanosine-3'-phosphate
  modified_base 16: mod_base = OTHER; note = guanosine-3'-phosphate
  modified_base 17: mod_base = OTHER; note = uridine-3'-phosphate
  modified_base 18: mod_base = OTHER; note = uridine-3'-phosphate
  modified_base 19: mod_base = OTHER; note = guanosine-3'-phosphate
  misc_feature 1..19: note = RNA
  misc_feature 20..21: note = DNA
caggcaattgttttggttgtt

SEQ ID NO: 2336 - DNA, 21 bp, synthetic construct
  source 1..21: mol_type = other DNA
  modified_base 1: mod_base = OTHER; note = uridine-3'-phosphate
  modified_base 2: mod_base = OTHER; note = uridine-3'-phosphate
  modified_base 3: mod_base = OTHER; note = uridine-3'-phosphate
  modified_base 4: mod_base = OTHER; note = guanosine-3'-phosphate
  modified_base 5: mod_base = OTHER; note = uridine-3'-phosphate
  modified_base 6: mod_base = OTHER; note = cytidine-3'-phosphate
  modified_base 7: mod_base = OTHER; note = cytidine-3'-phosphate
  modified_base 8: mod_base = OTHER; note = uridine-3'-phosphate
  modified_base 9: mod_base = OTHER; note = cytidine-3'-phosphate
  modified_base 10: mod_base = OTHER; note = cytidine-3'-phosphate
  modified_base 11: mod_base = OTHER; note = adenosine-3'-phosphate
  modified_base 12: mod_base = OTHER; note = guanosine-3'-phosphate
  modified_base 13: mod_base = OTHER; note = guanosine-3'-phosphate
  modified_base 14: mod_base = OTHER; note = cytidine-3'-phosphate
  modified_base 15: mod_base = OTHER; note = adenosine-3'-phosphate
  modified_base 16: mod_base = OTHER; note = adenosine-3'-phosphate
  modified_base 17: mod_base = OTHER; note = uridine-3'-phosphate
  modified_base 18: mod_base = OTHER; note = uridine-3'-phosphate
  modified_base 19: mod_base = OTHER; note = guanosine-3'-phosphate
  misc_feature 1..19: note = RNA
  misc_feature 20..21: note = DNA
tttgtcctccaggcaattgtt

SEQ ID NO: 2337 - DNA, 21 bp, synthetic construct
  source 1..21: mol_type = other DNA
  modified_base 1: mod_base = OTHER; note = adenosine-3'-phosphate
  modified_base 2: mod_base = OTHER; note = adenosine-3'-phosphate
  modified_base 3: mod_base = OTHER; note = guanosine-3'-phosphate
  modified_base 4: mod_base = OTHER; note = adenosine-3'-phosphate
  modified_base 5: mod_base = OTHER; note = adenosine-3'-phosphate
  modified_base 6: mod_base = OTHER; note = adenosine-3'-phosphate
  modified_base 7: mod_base = OTHER; note = cytidine-3'-phosphate
  modified_base 8: mod_base = OTHER; note = uridine-3'-phosphate
  modified_base 9: mod_base = OTHER; note = guanosine-3'-phosphate
  modified_base 10: mod_base = OTHER; note = guanosine-3'-phosphate
  modified_base 11: mod_base = OTHER; note = guanosine-3'-phosphate
  modified_base 12: mod_base = OTHER; note = uridine-3'-phosphate
  modified_base 13: mod_base = OTHER; note = uridine-3'-phosphate
  modified_base 14: mod_base = OTHER; note = uridine-3'-phosphate
  modified_base 15: mod_base = OTHER; note = uridine-3'-phosphate
  modified_base 16: mod_base = OTHER; note = guanosine-3'-phosphate
  modified_base 17: mod_base = OTHER; note = uridine-3'-phosphate
  modified_base 18: mod_base = OTHER; note = cytidine-3'-phosphate
  modified_base 19: mod_base = OTHER; note = cytidine-3'-phosphate
  misc_feature 1..19: note = RNA
  misc_feature 20..21: note = DNA
aagaaactgggttttgtcctt

SEQ ID NO: 2338 - DNA, 21 bp, synthetic construct
  source 1..21: mol_type = other DNA
  modified_base 1: mod_base = OTHER; note = adenosine-3'-phosphate
  modified_base 2: mod_base = OTHER; note = adenosine-3'-phosphate
  modified_base 3: mod_base = OTHER; note = uridine-3'-phosphate
  modified_base 4: mod_base = OTHER; note = adenosine-3'-phosphate
  modified_base 5: mod_base = OTHER; note = cytidine-3'-phosphate
  modified_base 6: mod_base = OTHER; note = adenosine-3'-phosphate
  modified_base 7: mod_base = OTHER; note = cytidine-3'-phosphate
  modified_base 8: mod_base = OTHER; note = adenosine-3'-phosphate
  modified_base 9: mod_base = OTHER; note = uridine-3'-phosphate
  modified_base 10: mod_base = OTHER; note = adenosine-3'-phosphate
  modified_base 11: mod_base = OTHER; note = adenosine-3'-phosphate
  modified_base 12: mod_base = OTHER; note = guanosine-3'-phosphate
  modified_base 13: mod_base = OTHER; note = adenosine-3'-phosphate
  modified_base 14: mod_base = OTHER; note = adenosine-3'-phosphate
  modified_base 15: mod_base = OTHER; note = adenosine-3'-phosphate
  modified_base 16: mod_base = OTHER; note = cytidine-3'-phosphate
  modified_base 17: mod_base = OTHER; note = uridine-3'-phosphate
  modified_base 18: mod_base = OTHER; note = guanosine-3'-phosphate
  modified_base 19: mod_base = OTHER; note = guanosine-3'-phosphate
  misc_feature 1..19: note = RNA
  misc_feature 20..21: note = DNA
aatacacataagaaactggtt

SEQ ID NO: 2339 - DNA, 21 bp, synthetic construct
  source 1..21: mol_type = other DNA
  modified_base 1: mod_base = OTHER; note = adenosine-3'-phosphate
  modified_base 2: mod_base = OTHER; note = cytidine-3'-phosphate
  modified_base 3: mod_base = OTHER; note = adenosine-3'-phosphate
  modified_base 4: mod_base = OTHER; note = adenosine-3'-phosphate
  modified_base 5: mod_base = OTHER; note = cytidine-3'-phosphate
  modified_base 6: mod_base = OTHER; note = uridine-3'-phosphate
  modified_base 7: mod_base = OTHER; note = uridine-3'-phosphate
  modified_base 8: mod_base = OTHER; note = cytidine-3'-phosphate
  modified_base 9: mod_base = OTHER; note = cytidine-3'-phosphate
  modified_base 10: mod_base = OTHER; note = adenosine-3'-phosphate
  modified_base 11: mod_base = OTHER; note = adenosine-3'-phosphate
  modified_base 12: mod_base = OTHER; note = adenosine-3'-phosphate
  modified_base 13: mod_base = OTHER; note = uridine-3'-phosphate
  modified_base 14: mod_base = OTHER; note = adenosine-3'-phosphate
  modified_base 15: mod_base = OTHER; note = cytidine-3'-phosphate
  modified_base 16: mod_base = OTHER; note = adenosine-3'-phosphate
  modified_base 17: mod_base = OTHER; note = cytidine-3'-phosphate
  modified_base 18: mod_base = OTHER; note = adenosine-3'-phosphate
  modified_base 19: mod_base = OTHER; note = uridine-3'-phosphate
  misc_feature 1..19: note = RNA
  misc_feature 20..21: note = DNA
acaacttccaaatacacattt

SEQ ID NO: 2340 - DNA, 21 bp, synthetic construct
  source 1..21: mol_type = other DNA
  modified_base 1: mod_base = OTHER; note = adenosine-3'-phosphate
  modified_base 2: mod_base = OTHER; note = uridine-3'-phosphate
  modified_base 3: mod_base = OTHER; note = guanosine-3'-phosphate
  modified_base 4: mod_base = OTHER; note = cytidine-3'-phosphate
  modified_base 5: mod_base = OTHER; note = uridine-3'-phosphate
  modified_base 6: mod_base = OTHER; note = uridine-3'-phosphate
  modified_base 7: mod_base = OTHER; note = uridine-3'-phosphate
  modified_base 8: mod_base = OTHER; note = guanosine-3'-phosphate
  modified_base 9: mod_base = OTHER; note = adenosine-3'-phosphate
  modified_base 10: mod_base = OTHER; note = uridine-3'-phosphate
  modified_base 11: mod_base = OTHER; note = adenosine-3'-phosphate
  modified_base 12: mod_base = OTHER; note = cytidine-3'-phosphate
  modified_base 13: mod_base = OTHER; note = adenosine-3'-phosphate
  modified_base 14: mod_base = OTHER; note = adenosine-3'-phosphate
  modified_base 15: mod_base = OTHER; note = cytidine-3'-phosphate
  modified_base 16: mod_base = OTHER; note = uridine-3'-phosphate
  modified_base 17: mod_base = OTHER; note = uridine-3'-phosphate
  modified_base 18: mod_base = OTHER; note = cytidine-3'-phosphate
  modified_base 19: mod_base = OTHER; note = cytidine-3'-phosphate
  misc_feature 1..19: note = RNA
  misc_feature 20..21: note = DNA
atgctttgatacaacttcctt

SEQ ID NO: 2341 - DNA, 21 bp, synthetic construct
  source 1..21: mol_type = other DNA
  modified_base 1: mod_base = OTHER; note = uridine-3'-phosphate
  modified_base 2: mod_base = OTHER; note = uridine-3'-phosphate
  modified_base 3: mod_base = OTHER; note = guanosine-3'-phosphate
  modified_base 4: mod_base = OTHER; note = adenosine-3'-phosphate
  modified_base 5: mod_base = OTHER; note = adenosine-3'-phosphate
  modified_base 6: mod_base = OTHER; note = adenosine-3'-phosphate
  modified_base 7: mod_base = OTHER; note = adenosine-3'-phosphate
  modified_base 8: mod_base = OTHER; note = adenosine-3'-phosphate
  modified_base 9: mod_base = OTHER; note = uridine-3'-phosphate
  modified_base 10: mod_base = OTHER; note = guanosine-3'-phosphate
  modified_base 11: mod_base = OTHER; note = cytidine-3'-phosphate
  modified_base 12: mod_base = OTHER; note = uridine-3'-phosphate
  modified_base 13: mod_base = OTHER; note = uridine-3'-phosphate
  modified_base 14: mod_base = OTHER; note = uridine-3'-phosphate
  modified_base 15: mod_base = OTHER; note = guanosine-3'-phosphate
  modified_base 16: mod_base = OTHER; note = adenosine-3'-phosphate
  modified_base 17: mod_base = OTHER; note = uridine-3'-phosphate
  modified_base 18: mod_base = OTHER; note = adenosine-3'-phosphate
  modified_base 19: mod_base = OTHER; note = cytidine-3'-phosphate
  misc_feature 1..19: note = RNA
  misc_feature 20..21: note = DNA
ttgaaaaatgctttgatactt

SEQ ID NO: 2342 - DNA, 21 bp, synthetic construct
  source 1..21: mol_type = other DNA
  modified_base 1: mod_base = OTHER; note = uridine-3'-phosphate
  modified_base 2: mod_base = OTHER; note = uridine-3'-phosphate
  modified_base 3: mod_base = OTHER; note = cytidine-3'-phosphate
  modified_base 4: mod_base = OTHER; note = uridine-3'-phosphate
  modified_base 5: mod_base = OTHER; note = uridine-3'-phosphate
  modified_base 6: mod_base = OTHER; note = uridine-3'-phosphate
  modified_base 7: mod_base = OTHER; note = uridine-3'-phosphate
  modified_base 8: mod_base = OTHER; note = uridine-3'-phosphate
  modified_base 9: mod_base = OTHER; note = guanosine-3'-phosphate
  modified_base 10: mod_base = OTHER; note = adenosine-3'-phosphate
  modified_base 11: mod_base = OTHER; note = uridine-3'-phosphate
  modified_base 12: mod_base = OTHER; note = uridine-3'-phosphate
  modified_base 13: mod_base = OTHER; note = uridine-3'-phosphate
  modified_base 14: mod_base = OTHER; note = uridine-3'-phosphate
  modified_base 15: mod_base = OTHER; note = guanosine-3'-phosphate
  modified_base 16: mod_base = OTHER; note = adenosine-3'-phosphate
  modified_base 17: mod_base = OTHER; note = adenosine-3'-phosphate
  modified_base 18: mod_base = OTHER; note = adenosine-3'-phosphate
  modified_base 19: mod_base = OTHER; note = adenosine-3'-phosphate
  misc_feature 1..19: note = RNA
  misc_feature 20..21: note = DNA
ttctttttgattttgaaaatt

SEQ ID NO: 2343 - DNA, 21 bp, synthetic construct
  source 1..21: mol_type = other DNA
  modified_base 1: mod_base = OTHER; note = guanosine-3'-phosphate
  modified_base 2: mod_base = OTHER; note = uridine-3'-phosphate
  modified_base 3: mod_base = OTHER; note = uridine-3'-phosphate
  modified_base 4: mod_base = OTHER; note = adenosine-3'-phosphate
  modified_base 5: mod_base = OTHER; note = uridine-3'-phosphate
  modified_base 6: mod_base = OTHER; note = uridine-3'-phosphate
  modified_base 7: mod_base = OTHER; note = guanosine-3'-phosphate
  modified_base 8: mod_base = OTHER; note = guanosine-3'-phosphate
  modified_base 9: mod_base = OTHER; note = cytidine-3'-phosphate
  modified_base 10: mod_base = OTHER; note = adenosine-3'-phosphate
  modified_base 11: mod_base = OTHER; note = uridine-3'-phosphate
  modified_base 12: mod_base = OTHER; note = uridine-3'-phosphate
  modified_base 13: mod_base = OTHER; note = cytidine-3'-phosphate
  modified_base 14: mod_base = OTHER; note = uridine-3'-phosphate
  modified_base 15: mod_base = OTHER; note = uridine-3'-phosphate
  modified_base 16: mod_base = OTHER; note = uridine-3'-phosphate
  modified_base 17: mod_base = OTHER; note = uridine-3'-phosphate
  modified_base 18: mod_base = OTHER; note = uridine-3'-phosphate
  modified_base 19: mod_base = OTHER; note = guanosine-3'-phosphate
  misc_feature 1..19: note = RNA
  misc_feature 20..21: note = DNA
gttattggcattctttttgtt

SEQ ID NO: 2344 - DNA, 21 bp, synthetic construct
  source 1..21: mol_type = other DNA
  modified_base 1: mod_base = OTHER; note = adenosine-3'-phosphate
  modified_base 2: mod_base = OTHER; note = uridine-3'-phosphate
  modified_base 3: mod_base = OTHER; note = uridine-3'-phosphate
  modified_base 4: mod_base = OTHER; note = guanosine-3'-phosphate
  modified_base 5: mod_base = OTHER; note = uridine-3'-phosphate
  modified_base 6: mod_base = OTHER; note = cytidine-3'-phosphate
  modified_base 7: mod_base = OTHER; note = adenosine-3'-phosphate
  modified_base 8: mod_base = OTHER; note = uridine-3'-phosphate
  modified_base 9: mod_base = OTHER; note = adenosine-3'-phosphate
  modified_base 10: mod_base = OTHER; note = guanosine-3'-phosphate
  modified_base 11: mod_base = OTHER; note = guanosine-3'-phosphate
  modified_base 12: mod_base = OTHER; note = uridine-3'-phosphate
  modified_base 13: mod_base = OTHER; note = uridine-3'-phosphate
  modified_base 14: mod_base = OTHER; note = adenosine-3'-phosphate
  modified_base 15: mod_base = OTHER; note = uridine-3'-phosphate
  modified_base 16: mod_base = OTHER; note = uridine-3'-phosphate
  modified_base 17: mod_base = OTHER; note = guanosine-3'-phosphate
  modified_base 18: mod_base = OTHER; note = guanosine-3'-phosphate
  modified_base 19: mod_base = OTHER; note = cytidine-3'-phosphate
  misc_feature 1..19: note = RNA
  misc_feature 20..21: note = DNA
attgtcataggttattggctt

SEQ ID NO: 2345 - DNA, 21 bp, synthetic construct
  source 1..21: mol_type = other DNA
  modified_base 1: mod_base = OTHER; note = adenosine-3'-phosphate
  modified_base 2: mod_base = OTHER; note = guanosine-3'-phosphate
  modified_base 3: mod_base = OTHER; note = adenosine-3'-phosphate
  modified_base 4: mod_base = OTHER; note = adenosine-3'-phosphate
  modified_base 5: mod_base = OTHER; note = adenosine-3'-phosphate
  modified_base 6: mod_base = OTHER; note = uridine-3'-phosphate
  modified_base 7: mod_base = OTHER; note = cytidine-3'-phosphate
  modified_base 8: mod_base = OTHER; note = cytidine-3'-phosphate
  modified_base 9: mod_base = OTHER; note = adenosine-3'-phosphate
  modified_base 10: mod_base = OTHER; note = uridine-3'-phosphate
  modified_base 11: mod_base = OTHER; note = uridine-3'-phosphate
  modified_base 12: mod_base = OTHER; note = guanosine-3'-phosphate
  modified_base 13: mod_base = OTHER; note = uridine-3'-phosphate
  modified_base 14: mod_base = OTHER; note = cytidine-3'-phosphate
  modified_base 15: mod_base = OTHER; note = adenosine-3'-phosphate
  modified_base 16: mod_base = OTHER; note = uridine-3'-phosphate
  modified_base 17: mod_base = OTHER; note = adenosine-3'-phosphate
  modified_base 18: mod_base = OTHER; note = guanosine-3'-phosphate
  modified_base 19: mod_base = OTHER; note = guanosine-3'-phosphate
  misc_feature 1..19: note = RNA
  misc_feature 20..21: note = DNA
agaaatccattgtcataggtt

SEQ ID NO: 2346 - DNA, 21 bp, synthetic construct
  source 1..21: mol_type = other DNA
  modified_base 1: mod_base = OTHER; note = adenosine-3'-phosphate
  modified_base 2: mod_base = OTHER; note = uridine-3'-phosphate
  modified_base 3: mod_base = OTHER; note = guanosine-3'-phosphate
  modified_base 4: mod_base = OTHER; note = adenosine-3'-phosphate
  modified_base 5: mod_base = OTHER; note = adenosine-3'-phosphate
  modified_base 6: mod_base = OTHER; note = uridine-3'-phosphate
  modified_base 7: mod_base = OTHER; note = guanosine-3'-phosphate
  modified_base 8: mod_base = OTHER; note = adenosine-3'-phosphate
  modified_base 9: mod_base = OTHER; note = adenosine-3'-phosphate
  modified_base 10: mod_base = OTHER; note = guanosine-3'-phosphate
  modified_base 11: mod_base = OTHER; note = adenosine-3'-phosphate
  modified_base 12: mod_base = OTHER; note = guanosine-3'-phosphate
  modified_base 13: mod_base = OTHER; note = adenosine-3'-phosphate
  modified_base 14: mod_base = OTHER; note = adenosine-3'-phosphate
  modified_base 15: mod_base = OTHER; note = adenosine-3'-phosphate
  modified_base 16: mod_base = OTHER; note = uridine-3'-phosphate
  modified_base 17: mod_base = OTHER; note = cytidine-3'-phosphate
  modified_base 18: mod_base = OTHER; note = cytidine-3'-phosphate
  modified_base 19: mod_base = OTHER; note = adenosine-3'-phosphate
  misc_feature 1..19: note = RNA
  misc_feature 20..21: note = DNA
atgaatgaagagaaatccatt

SEQ ID NO: 2347 - DNA, 21 bp, synthetic construct
  source 1..21: mol_type = other DNA
  modified_base 1: mod_base = OTHER; note = adenosine-3'-phosphate
  modified_base 2: mod_base = OTHER; note = guanosine-3'-phosphate
  modified_base 3: mod_base = OTHER; note = guanosine-3'-phosphate
  modified_base 4: mod_base = OTHER; note = uridine-3'-phosphate
  modified_base 5: mod_base = OTHER; note = uridine-3'-phosphate
  modified_base 6: mod_base = OTHER; note = uridine-3'-phosphate
  modified_base 7: mod_base = OTHER; note = guanosine-3'-phosphate
  modified_base 8: mod_base = OTHER; note = uridine-3'-phosphate
  modified_base 9: mod_base = OTHER; note = cytidine-3'-phosphate
  modified_base 10: mod_base = OTHER; note = uridine-3'-phosphate
  modified_base 11: mod_base = OTHER; note = guanosine-3'-phosphate
  modified_base 12: mod_base = OTHER; note = uridine-3'-phosphate
  modified_base 13: mod_base = OTHER; note = adenosine-3'-phosphate
  modified_base 14: mod_base = OTHER; note = uridine-3'-phosphate
  modified_base 15: mod_base = OTHER; note = guanosine-3'-phosphate
  modified_base 16: mod_base = OTHER; note = adenosine-3'-phosphate
  modified_base 17: mod_base = OTHER; note = adenosine-3'-phosphate
  modified_base 18: mod_base = OTHER; note = uridine-3'-phosphate
  modified_base 19: mod_base = OTHER; note = guanosine-3'-phosphate
  misc_feature 1..19: note = RNA
  misc_feature 20..21: note = DNA
aggtttgtctgtatgaatgtt

SEQ ID NO: 2348 - DNA, 21 bp, synthetic construct
  source 1..21: mol_type = other DNA
  modified_base 1: mod_base = OTHER; note = guanosine-3'-phosphate
  modified_base 2: mod_base = OTHER; note = uridine-3'-phosphate
  modified_base 3: mod_base = OTHER; note = adenosine-3'-phosphate
  modified_base 4: mod_base = OTHER; note = uridine-3'-phosphate
  modified_base 5: mod_base = OTHER; note = adenosine-3'-phosphate
  modified_base 6: mod_base = OTHER; note = adenosine-3'-phosphate
  modified_base 7: mod_base = OTHER; note = adenosine-3'-phosphate
  modified_base 8: mod_base = OTHER; note = cytidine-3'-phosphate
  modified_base 9: mod_base = OTHER; note = adenosine-3'-phosphate
  modified_base 10: mod_base = OTHER; note = guanosine-3'-phosphate
  modified_base 11: mod_base = OTHER; note = guanosine-3'-phosphate
  modified_base 12: mod_base = OTHER; note = uridine-3'-phosphate
  modified_base 13: mod_base = OTHER; note = uridine-3'-phosphate
  modified_base 14: mod_base = OTHER; note = uridine-3'-phosphate
  modified_base 15: mod_base = OTHER; note = guanosine-3'-phosphate
  modified_base 16: mod_base = OTHER; note = uridine-3'-phosphate
  modified_base 17: mod_base = OTHER; note = cytidine-3'-phosphate
  modified_base 18: mod_base = OTHER; note = uridine-3'-phosphate
  modified_base 19: mod_base = OTHER; note = guanosine-3'-phosphate
  misc_feature 1..19: note = RNA
  misc_feature 20..21: note = DNA
gtataaacaggtttgtctgtt

SEQ ID NO: 2349 - DNA, 21 bp, synthetic construct
  source 1..21: mol_type = other DNA
  modified_base 1: mod_base = OTHER; note = adenosine-3'-phosphate
  modified_base 2: mod_base = OTHER; note = cytidine-3'-phosphate
  modified_base 3: mod_base = OTHER; note = uridine-3'-phosphate
  modified_base 4: mod_base = OTHER; note = guanosine-3'-phosphate
  modified_base 5: mod_base = OTHER; note = guanosine-3'-phosphate
  modified_base 6: mod_base = OTHER; note = uridine-3'-phosphate
  modified_base 7: mod_base = OTHER; note = cytidine-3'-phosphate
  modified_base 8: mod_base = OTHER; note = uridine-3'-phosphate
  modified_base 9: mod_base = OTHER; note = guanosine-3'-phosphate
  modified_base 10: mod_base = OTHER; note = guanosine-3'-phosphate
  modified_base 11: mod_base = OTHER; note = adenosine-3'-phosphate
  modified_base 12: mod_base = OTHER; note = guanosine-3'-phosphate
  modified_base 13: mod_base = OTHER; note = uridine-3'-phosphate
  modified_base 14: mod_base = OTHER; note = adenosine-3'-phosphate
  modified_base 15: mod_base = OTHER; note = uridine-3'-phosphate
  modified_base 16: mod_base = OTHER; note = adenosine-3'-phosphate
  modified_base 17: mod_base = OTHER; note = adenosine-3'-phosphate
  modified_base 18: mod_base = OTHER; note = adenosine-3'-phosphate
  modified_base 19: mod_base = OTHER; note = cytidine-3'-phosphate
  misc_feature 1..19: note = RNA
  misc_feature 20..21: note = DNA
actggtctggagtataaactt

SEQ ID NO: 2350 - DNA, 21 bp, synthetic construct
  source 1..21: mol_type = other DNA
  modified_base 1: mod_base = OTHER; note = adenosine-3'-phosphate
  modified_base 2: mod_base = OTHER; note = adenosine-3'-phosphate
  modified_base 3: mod_base = OTHER; note = cytidine-3'-phosphate
  modified_base 4: mod_base = OTHER; note = uridine-3'-phosphate
  modified_base 5: mod_base = OTHER; note = uridine-3'-phosphate
  modified_base 6: mod_base = OTHER; note = uridine-3'-phosphate
  modified_base 7: mod_base = OTHER; note = uridine-3'-phosphate
  modified_base 8: mod_base = OTHER; note = adenosine-3'-phosphate
  modified_base 9: mod_base = OTHER; note = cytidine-3'-phosphate
  modified_base 10: mod_base = OTHER; note = uridine-3'-phosphate
  modified_base 11: mod_base = OTHER; note = guanosine-3'-phosphate
  modified_base 12: mod_base = OTHER; note = adenosine-3'-phosphate
  modified_base 13: mod_base = OTHER; note = cytidine-3'-phosphate
  modified_base 14: mod_base = OTHER; note = uridine-3'-phosphate
  modified_base 15: mod_base = OTHER; note = guanosine-3'-phosphate
  modified_base 16: mod_base = OTHER; note = guanosine-3'-phosphate
  modified_base 17: mod_base = OTHER; note = uridine-3'-phosphate
  modified_base 18: mod_base = OTHER; note = cytidine-3'-phosphate
  modified_base 19: mod_base = OTHER; note = uridine-3'-phosphate
  misc_feature 1..19: note = RNA
  misc_feature 20..21: note = DNA
aacttttactgactggtcttt

SEQ ID NO: 2351 - DNA, 21 bp, synthetic construct
  source 1..21: mol_type = other DNA
  modified_base 1: mod_base = OTHER; note = adenosine-3'-phosphate
  modified_base 2: mod_base = OTHER; note = uridine-3'-phosphate
  modified_base 3: mod_base = OTHER; note = adenosine-3'-phosphate
  modified_base 4: mod_base = OTHER; note = adenosine-3'-phosphate
  modified_base 5: mod_base = OTHER; note = adenosine-3'-phosphate
  modified_base 6: mod_base = OTHER; note = cytidine-3'-phosphate
  modified_base 7: mod_base = OTHER; note = uridine-3'-phosphate
  modified_base 8: mod_base = OTHER; note = cytidine-3'-phosphate
  modified_base 9: mod_base = OTHER; note = uridine-3'-phosphate
  modified_base 10: mod_base = OTHER; note = adenosine-3'-phosphate
  modified_base 11: mod_base = OTHER; note = adenosine-3'-phosphate
  modified_base 12: mod_base = OTHER; note = cytidine-3'-phosphate
  modified_base 13: mod_base = OTHER; note = uridine-3'-phosphate
  modified_base 14: mod_base = OTHER; note = uridine-3'-phosphate
  modified_base 15: mod_base = OTHER; note = uridine-3'-phosphate
  modified_base 16: mod_base = OTHER; note = uridine-3'-phosphate
  modified_base 17: mod_base = OTHER; note = adenosine-3'-phosphate
  modified_base 18: mod_base = OTHER; note = cytidine-3'-phosphate
  modified_base 19: mod_base = OTHER; note = uridine-3'-phosphate
  misc_feature 1..19: note = RNA
  misc_feature 20..21: note = DNA
ataaactctaacttttacttt

SEQ ID NO: 2352 - DNA, 21 bp, synthetic construct
  source 1..21: mol_type = other DNA
  modified_base 1: mod_base = OTHER; note = cytidine-3'-phosphate
  modified_base 2: mod_base = OTHER; note = adenosine-3'-phosphate
  modified_base 3: mod_base = OTHER; note = uridine-3'-phosphate
  modified_base 4: mod_base = OTHER; note = uridine-3'-phosphate
  modified_base 5: mod_base = OTHER; note = cytidine-3'-phosphate
  modified_base 6: mod_base = OTHER; note = adenosine-3'-phosphate
  modified_base 7: mod_base = OTHER; note = adenosine-3'-phosphate
  modified_base 8: mod_base = OTHER; note = cytidine-3'-phosphate
  modified_base 9: mod_base = OTHER; note = guanosine-3'-phosphate
  modified_base 10: mod_base = OTHER; note = adenosine-3'-phosphate
  modified_base 11: mod_base = OTHER; note = adenosine-3'-phosphate
  modified_base 12: mod_base = OTHER; note = uridine-3'-phosphate
  modified_base 13: mod_base = OTHER; note = adenosine-3'-phosphate
  modified_base 14: mod_base = OTHER; note = adenosine-3'-phosphate
  modified_base 15: mod_base = OTHER; note = adenosine-3'-phosphate
  modified_base 16: mod_base = OTHER; note = cytidine-3'-phosphate
  modified_base 17: mod_base = OTHER; note = uridine-3'-phosphate
  modified_base 18: mod_base = OTHER; note = cytidine-3'-phosphate
  modified_base 19: mod_base = OTHER; note = uridine-3'-phosphate
  misc_feature 1..19: note = RNA
  misc_feature 20..21: note = DNA
cattcaacgaataaactcttt

SEQ ID NO: 2353 - DNA, 21 bp, synthetic construct
  source 1..21: mol_type = other DNA
  modified_base 1: mod_base = OTHER; note = uridine-3'-phosphate
  modified_base 2: mod_base = OTHER; note = uridine-3'-phosphate
  modified_base 3: mod_base = OTHER; note = cytidine-3'-phosphate
  modified_base 4: mod_base = OTHER; note = adenosine-3'-phosphate
  modified_base 5: mod_base = OTHER; note = adenosine-3'-phosphate
  modified_base 6: mod_base = OTHER; note = guanosine-3'-phosphate
  modified_base 7: mod_base = OTHER; note = uridine-3'-phosphate
  modified_base 8: mod_base = OTHER; note = cytidine-3'-phosphate
  modified_base 9: mod_base = OTHER; note = guanosine-3'-phosphate
  modified_base 10: mod_base = OTHER; note = uridine-3'-phosphate
  modified_base 11: mod_base = OTHER; note = cytidine-3'-phosphate
  modified_base 12: mod_base = OTHER; note = adenosine-3'-phosphate
  modified_base 13: mod_base = OTHER; note = uridine-3'-phosphate
  modified_base 14: mod_base = OTHER; note = uridine-3'-phosphate
  modified_base 15: mod_base = OTHER; note = cytidine-3'-phosphate
  modified_base 16: mod_base = OTHER; note = adenosine-3'-phosphate
  modified_base 17: mod_base = OTHER; note = adenosine-3'-phosphate
  modified_base 18: mod_base = OTHER; note = cytidine-3'-phosphate
  modified_base 19: mod_base = OTHER; note = guanosine-3'-phosphate
  misc_feature 1..19: note = RNA
  misc_feature 20..21: note = DNA
ttcaagtcgtcattcaacgtt

SEQ ID NO: 2354 - DNA, 21 bp, synthetic construct
  source 1..21: mol_type = other DNA
  modified_base 1: mod_base = OTHER; note = uridine-3'-phosphate
  modified_base 2: mod_base = OTHER; note = cytidine-3'-phosphate
  modified_base 3: mod_base = OTHER; note = uridine-3'-phosphate
  modified_base 4: mod_base = OTHER; note = uridine-3'-phosphate
  modified_base 5: mod_base = OTHER; note = uridine-3'-phosphate
  modified_base 6: mod_base = OTHER; note = uridine-3'-phosphate
  modified_base 7: mod_base = OTHER; note = guanosine-3'-phosphate
  modified_base 8: mod_base = OTHER; note = guanosine-3'-phosphate
  modified_base 9: mod_base = OTHER; note = cytidine-3'-phosphate
  modified_base 10: mod_base = OTHER; note = uridine-3'-phosphate
  modified_base 11: mod_base = OTHER; note = guanosine-3'-phosphate
  modified_base 12: mod_base = OTHER; note = guanosine-3'-phosphate
  modified_base 13: mod_base = OTHER; note = cytidine-3'-phosphate
  modified_base 14: mod_base = OTHER; note = uridine-3'-phosphate
  modified_base 15: mod_base = OTHER; note = uridine-3'-phosphate
  modified_base 16: mod_base = OTHER; note = cytidine-3'-phosphate
  modified_base 17: mod_base = OTHER; note = adenosine-3'-phosphate
  modified_base 18: mod_base = OTHER; note = adenosine-3'-phosphate
  modified_base 19: mod_base = OTHER; note = guanosine-3'-phosphate
  misc_feature 1..19: note = RNA
  misc_feature 20..21: note = DNA
tcttttggctggcttcaagtt

SEQ ID NO: 2355 - DNA, 21 bp, synthetic construct
  source 1..21: mol_type = other DNA
  modified_base 1: mod_base = OTHER; note = cytidine-3'-phosphate
  modified_base 2: mod_base = OTHER; note = adenosine-3'-phosphate
  modified_base 3: mod_base = OTHER; note = guanosine-3'-phosphate
  modified_base 4: mod_base = OTHER; note = uridine-3'-phosphate
  modified_base 5: mod_base = OTHER; note = uridine-3'-phosphate
  modified_base 6: mod_base = OTHER; note = uridine-3'-phosphate
  modified_base 7: mod_base = OTHER; note = cytidine-3'-phosphate
  modified_base 8: mod_base = OTHER; note = uridine-3'-phosphate
  modified_base 9: mod_base = OTHER; note = cytidine-3'-phosphate
  modified_base 10: mod_base = OTHER; note = uridine-3'-phosphate
  modified_base 11: mod_base = OTHER; note = uridine-3'-phosphate
  modified_base 12: mod_base = OTHER; note = uridine-3'-phosphate
  modified_base 13: mod_base = OTHER; note = uridine-3'-phosphate
  modified_base 14: mod_base = OTHER; note = guanosine-3'-phosphate
  modified_base 15: mod_base = OTHER; note = guanosine-3'-phosphate
  modified_base 16: mod_base = OTHER; note = cytidine-3'-phosphate
  modified_base 17: mod_base = OTHER; note = uridine-3'-phosphate
  modified_base 18: mod_base = OTHER; note = guanosine-3'-phosphate
  modified_base 19: mod_base = OTHER; note = guanosine-3'-phosphate
  misc_feature 1..19: note = RNA
  misc_feature 20..21: note = DNA
cagtttctcttttggctggtt

SEQ ID NO: 2356 - DNA, 21 bp, synthetic construct
  source 1..21: mol_type = other DNA
  modified_base 1: mod_base = OTHER; note = adenosine-3'-phosphate
  modified_base 2: mod_base = OTHER; note = uridine-3'-phosphate
  modified_base 3: mod_base = OTHER; note = guanosine-3'-phosphate
  modified_base 4: mod_base = OTHER; note = adenosine-3'-phosphate
  modified_base 5: mod_base = OTHER; note = adenosine-3'-phosphate
  modified_base 6: mod_base = OTHER; note = adenosine-3'-phosphate
  modified_base 7: mod_base = OTHER; note = guanosine-3'-phosphate
  modified_base 8: mod_base = OTHER; note = uridine-3'-phosphate
  modified_base 9: mod_base = OTHER; note = uridine-3'-phosphate
  modified_base 10: mod_base = OTHER; note = adenosine-3'-phosphate
  modified_base 11: mod_base = OTHER; note = adenosine-3'-phosphate
  modified_base 12: mod_base = OTHER; note = guanosine-3'-phosphate
  modified_base 13: mod_base = OTHER; note = adenosine-3'-phosphate
  modified_base 14: mod_base = OTHER; note = cytidine-3'-phosphate
  modified_base 15: mod_base = OTHER; note = adenosine-3'-phosphate
  modified_base 16: mod_base = OTHER; note = guanosine-3'-phosphate
  modified_base 17: mod_base = OTHER; note = uridine-3'-phosphate
  modified_base 18: mod_base = OTHER; note = uridine-3'-phosphate
  modified_base 19: mod_base = OTHER; note = uridine-3'-phosphate
  misc_feature 1..19: note = RNA
  misc_feature 20..21: note = DNA
atgaaagttaagacagttttt

SEQ ID NO: 2357 - DNA, 21 bp, synthetic construct
  source 1..21: mol_type = other DNA
  modified_base 1: mod_base = OTHER; note = uridine-3'-phosphate
  modified_base 2: mod_base = OTHER; note = uridine-3'-phosphate
  modified_base 3: mod_base = OTHER; note = cytidine-3'-phosphate
  modified_base 4: mod_base = OTHER; note = adenosine-3'-phosphate
  modified_base 5: mod_base = OTHER; note = guanosine-3'-phosphate
  modified_base 6: mod_base = OTHER; note = guanosine-3'-phosphate
  modified_base 7: mod_base = OTHER; note = adenosine-3'-phosphate
  modified_base 8: mod_base = OTHER; note = uridine-3'-phosphate
  modified_base 9: mod_base = OTHER; note = cytidine-3'-phosphate
  modified_base 10: mod_base = OTHER; note = uridine-3'-phosphate
  modified_base 11: mod_base = OTHER; note = adenosine-3'-phosphate
  modified_base 12: mod_base = OTHER; note = uridine-3'-phosphate
  modified_base 13: mod_base = OTHER; note = guanosine-3'-phosphate
  modified_base 14: mod_base = OTHER; note = adenosine-3'-phosphate
  modified_base 15: mod_base = OTHER; note = adenosine-3'-phosphate
  modified_base 16: mod_base = OTHER; note = adenosine-3'-phosphate
  modified_base 17: mod_base = OTHER; note = guanosine-3'-phosphate
  modified_base 18: mod_base = OTHER; note = uridine-3'-phosphate
  modified_base 19: mod_base = OTHER; note = uridine-3'-phosphate
  misc_feature 1..19: note = RNA
  misc_feature 20..21: note = DNA
ttcaggatctatgaaagtttt

SEQ ID NO: 2358 - DNA, 21 bp, synthetic construct
  source 1..21: mol_type = other DNA
  modified_base 1: mod_base = OTHER; note = uridine-3'-phosphate
  modified_base 2: mod_base = OTHER; note = guanosine-3'-phosphate
  modified_base 3: mod_base = OTHER; note = adenosine-3'-phosphate
  modified_base 4: mod_base = OTHER; note = uridine-3'-phosphate
  modified_base 5: mod_base = OTHER; note = cytidine-3'-phosphate
  modified_base 6: mod_base = OTHER; note = cytidine-3'-phosphate
  modified_base 7: mod_base = OTHER; note = uridine-3'-phosphate
  modified_base 8: mod_base = OTHER; note = uridine-3'-phosphate
  modified_base 9: mod_base = OTHER; note = cytidine-3'-phosphate
  modified_base 10: mod_base = OTHER; note = adenosine-3'-phosphate
  modified_base 11: mod_base = OTHER; note = guanosine-3'-phosphate
  modified_base 12: mod_base = OTHER; note = guanosine-3'-phosphate
  modified_base 13: mod_base = OTHER; note = adenosine-3'-phosphate
  modified_base 14: mod_base = OTHER; note = uridine-3'-phosphate
  modified_base 15: mod_base = OTHER; note = cytidine-3'-phosphate
  modified_base 16: mod_base = OTHER; note = uridine-3'-phosphate
  modified_base 17: mod_base = OTHER; note = adenosine-3'-phosphate
  modified_base 18: mod_base = OTHER; note = uridine-3'-phosphate
  modified_base 19: mod_base = OTHER; note = guanosine-3'-phosphate
  misc_feature 1..19: note = RNA
  misc_feature 20..21: note = DNA
tgatccttcaggatctatgtt

SEQ ID NO: 2359 - DNA, 21 bp, synthetic construct
  source 1..21: mol_type = other DNA
  modified_base 1: mod_base = OTHER; note = uridine-3'-phosphate
  modified_base 2: mod_base = OTHER; note = guanosine-3'-phosphate
  modified_base 3: mod_base = OTHER; note = uridine-3'-phosphate
  modified_base 4: mod_base = OTHER; note = cytidine-3'-phosphate
  modified_base 5: mod_base = OTHER; note = adenosine-3'-phosphate
  modified_base 6: mod_base = OTHER; note = adenosine-3'-phosphate
  modified_base 7: mod_base = OTHER; note = cytidine-3'-phosphate
  modified_base 8: mod_base = OTHER; note = uridine-3'-phosphate
  modified_base 9: mod_base = OTHER; note = uridine-3'-phosphate
  modified_base 10: mod_base = OTHER; note = cytidine-3'-phosphate
  modified_base 11: mod_base = OTHER; note = uridine-3'-phosphate
  modified_base 12: mod_base = OTHER; note = guanosine-3'-phosphate
  modified_base 13: mod_base = OTHER; note = adenosine-3'-phosphate
  modified_base 14: mod_base = OTHER; note = uridine-3'-phosphate
  modified_base 15: mod_base = OTHER; note = cytidine-3'-phosphate
  modified_base 16: mod_base = OTHER; note = cytidine-3'-phosphate
  modified_base 17: mod_base = OTHER; note = uridine-3'-phosphate
  modified_base 18: mod_base = OTHER; note = uridine-3'-phosphate
  modified_base 19: mod_base = OTHER; note = cytidine-3'-phosphate
  misc_feature 1..19: note = RNA
  misc_feature 20..21: note = DNA
tgtcaacttctgatccttctt

SEQ ID NO: 2360 - DNA, 21 bp, synthetic construct
  source 1..21: mol_type = other DNA
  modified_base 1: mod_base = OTHER; note = adenosine-3'-phosphate
  modified_base 2: mod_base = OTHER; note = adenosine-3'-phosphate
  modified_base 3: mod_base = OTHER; note = uridine-3'-phosphate
  modified_base 4: mod_base = OTHER; note = uridine-3'-phosphate
  modified_base 5: mod_base = OTHER; note = uridine-3'-phosphate
  modified_base 6: mod_base = OTHER; note = cytidine-3'-phosphate
  modified_base 7: mod_base = OTHER; note = uridine-3'-phosphate
  modified_base 8: mod_base = OTHER; note = uridine-3'-phosphate
  modified_base 9: mod_base = OTHER; note = cytidine-3'-phosphate
  modified_base 10: mod_base = OTHER; note = uridine-3'-phosphate
  modified_base 11: mod_base = OTHER; note = adenosine-3'-phosphate
  modified_base 12: mod_base = OTHER; note = cytidine-3'-phosphate
  modified_base 13: mod_base = OTHER; note = cytidine-3'-phosphate
  modified_base 14: mod_base = OTHER; note = adenosine-3'-phosphate
  modified_base 15: mod_base = OTHER; note = uridine-3'-phosphate
  modified_base 16: mod_base = OTHER; note = guanosine-3'-phosphate
  modified_base 17: mod_base = OTHER; note = uridine-3'-phosphate
  modified_base 18: mod_base = OTHER; note = cytidine-3'-phosphate
  modified_base 19: mod_base = OTHER; note = adenosine-3'-phosphate
  misc_feature 1..19: note = RNA
  misc_feature 20..21: note = DNA
aatttcttctaccatgtcatt

SEQ ID NO: 2361 - DNA, 21 bp, synthetic construct
  source 1..21: mol_type = other DNA
  modified_base 1: mod_base = OTHER; note = cytidine-3'-phosphate
  modified_base 2: mod_base = OTHER; note = adenosine-3'-phosphate
  modified_base 3: mod_base = OTHER; note = adenosine-3'-phosphate
  modified_base 4: mod_base = OTHER; note = uridine-3'-phosphate
  modified_base 5: mod_base = OTHER; note = adenosine-3'-phosphate
  modified_base 6: mod_base = OTHER; note = uridine-3'-phosphate
  modified_base 7: mod_base = OTHER; note = guanosine-3'-phosphate
  modified_base 8: mod_base = OTHER; note = adenosine-3'-phosphate
  modified_base 9: mod_base = OTHER; note = uridine-3'-phosphate
  modified_base 10: mod_base = OTHER; note = cytidine-3'-phosphate
  modified_base 11: mod_base = OTHER; note = adenosine-3'-phosphate
  modified_base 12: mod_base = OTHER; note = adenosine-3'-phosphate
  modified_base 13: mod_base = OTHER; note = uridine-3'-phosphate
  modified_base 14: mod_base = OTHER; note = uridine-3'-phosphate
  modified_base 15: mod_base = OTHER; note = uridine-3'-phosphate
  modified_base 16: mod_base = OTHER; note = cytidine-3'-phosphate
  modified_base 17: mod_base = OTHER; note = uridine-3'-phosphate
  modified_base 18: mod_base = OTHER; note = uridine-3'-phosphate
  modified_base 19: mod_base = OTHER; note = cytidine-3'-phosphate
  misc_feature 1..19: note = RNA
  misc_feature 20..21: note = DNA
caatatgatcaatttcttctt

SEQ ID NO: 2362 - DNA, 21 bp, synthetic construct
  source 1..21: mol_type = other DNA
  modified_base 1: mod_base = OTHER; note = adenosine-3'-phosphate
  modified_base 2: mod_base = OTHER; note = guanosine-3'-phosphate
  modified_base 3: mod_base = OTHER; note = adenosine-3'-phosphate
  modified_base 4: mod_base = OTHER; note = uridine-3'-phosphate
  modified_base 5: mod_base = OTHER; note = adenosine-3'-phosphate
  modified_base 6: mod_base = OTHER; note = adenosine-3'-phosphate
  modified_base 7: mod_base = OTHER; note = uridine-3'-phosphate
  modified_base 8: mod_base = OTHER; note = uridine-3'-phosphate
  modified_base 9: mod_base = OTHER; note = cytidine-3'-phosphate
  modified_base 10: mod_base = OTHER; note = cytidine-3'-phosphate
  modified_base 11: mod_base = OTHER; note = adenosine-3'-phosphate
  modified_base 12: mod_base = OTHER; note = adenosine-3'-phosphate
  modified_base 13: mod_base = OTHER; note = uridine-3'-phosphate
  modified_base 14: mod_base = OTHER; note = adenosine-3'-phosphate
  modified_base 15: mod_base = OTHER; note = uridine-3'-phosphate
  modified_base 16: mod_base = OTHER; note = guanosine-3'-phosphate
  modified_base 17: mod_base = OTHER; note = adenosine-3'-phosphate
  modified_base 18: mod_base = OTHER; note = uridine-3'-phosphate
  modified_base 19: mod_base = OTHER; note = cytidine-3'-phosphate
  misc_feature 1..19: note = RNA
  misc_feature 20..21: note = DNA
agataattccaatatgatctt

SEQ ID NO: 2363 - DNA, 21 bp, synthetic construct
  source 1..21: mol_type = other DNA
  modified_base 1: mod_base = OTHER; note = cytidine-3'-phosphate
  modified_base 2: mod_base = OTHER; note = adenosine-3'-phosphate
  modified_base 3: mod_base = OTHER; note = guanosine-3'-phosphate
  modified_base 4: mod_base = OTHER; note = guanosine-3'-phosphate
  modified_base 5: mod_base = OTHER; note = adenosine-3'-phosphate
  modified_base 6: mod_base = OTHER; note = adenosine-3'-phosphate
  modified_base 7: mod_base = OTHER; note = adenosine-3'-phosphate
  modified_base 8: mod_base = OTHER; note = adenosine-3'-phosphate
  modified_base 9: mod_base = OTHER; note = guanosine-3'-phosphate
  modified_base 10: mod_base = OTHER; note = adenosine-3'-phosphate
  modified_base 11: mod_base = OTHER; note = guanosine-3'-phosphate
  modified_base 12: mod_base = OTHER; note = adenosine-3'-phosphate
  modified_base 13: mod_base = OTHER; note = uridine-3'-phosphate
  modified_base 14: mod_base = OTHER; note = adenosine-3'-phosphate
  modified_base 15: mod_base = OTHER; note = adenosine-3'-phosphate
  modified_base 16: mod_base = OTHER; note = uridine-3'-phosphate
  modified_base 17: mod_base = OTHER; note = uridine-3'-phosphate
  modified_base 18: mod_base = OTHER; note = cytidine-3'-phosphate
  modified_base 19: mod_base = OTHER; note = cytidine-3'-phosphate
  misc_feature 1..19: note = RNA
  misc_feature 20..21: note = DNA
caggaaaagagataattcctt

SEQ ID NO: 2364 - DNA, 21 bp, synthetic construct
  source 1..21: mol_type = other DNA
  modified_base 1: mod_base = OTHER; note = cytidine-3'-phosphate
  modified_base 2: mod_base = OTHER; note = uridine-3'-phosphate
  modified_base 3: mod_base = OTHER; note = uridine-3'-phosphate
  modified_base 4: mod_base = OTHER; note = guanosine-3'-phosphate
  modified_base 5: mod_base = OTHER; note = adenosine-3'-phosphate
  modified_base 6: mod_base = OTHER; note = adenosine-3'-phosphate
  modified_base 7: mod_base = OTHER; note = guanosine-3'-phosphate
  modified_base 8: mod_base = OTHER; note = uridine-3'-phosphate
  modified_base 9: mod_base = OTHER; note = cytidine-3'-phosphate
  modified_base 10: mod_base = OTHER; note = adenosine-3'-phosphate
  modified_base 11: mod_base = OTHER; note = guanosine-3'-phosphate
  modified_base 12: mod_base = OTHER; note = guanosine-3'-phosphate
  modified_base 13: mod_base = OTHER; note = adenosine-3'-phosphate
  modified_base 14: mod_base = OTHER; note = adenosine-3'-phosphate
  modified_base 15: mod_base = OTHER; note = adenosine-3'-phosphate
  modified_base 16: mod_base = OTHER; note = adenosine-3'-phosphate
  modified_base 17: mod_base = OTHER; note = guanosine-3'-phosphate
  modified_base 18: mod_base = OTHER; note = adenosine-3'-phosphate
  modified_base 19: mod_base = OTHER; note = guanosine-3'-phosphate
  misc_feature 1..19: note = RNA
  misc_feature 20..21: note = DNA
cttgaagtcaggaaaagagtt

SEQ ID NO: 2365 - DNA, 21 bp, synthetic construct
  source 1..21: mol_type = other DNA
  modified_base 1: mod_base = OTHER; note = uridine-3'-phosphate
  modified_base 2: mod_base = OTHER; note = uridine-3'-phosphate
  modified_base 3: mod_base = OTHER; note = adenosine-3'-phosphate
  modified_base 4: mod_base = OTHER; note = guanosine-3'-phosphate
  modified_base 5: mod_base = OTHER; note = adenosine-3'-phosphate
  modified_base 6: mod_base = OTHER; note = cytidine-3'-phosphate
  modified_base 7: mod_base = OTHER; note = guanosine-3'-phosphate
  modified_base 8: mod_base = OTHER; note = guanosine-3'-phosphate
  modified_base 9: mod_base = OTHER; note = adenosine-3'-phosphate
  modified_base 10: mod_base = OTHER; note = adenosine-3'-phosphate
  modified_base 11: mod_base = OTHER; note = uridine-3'-phosphate
  modified_base 12: mod_base = OTHER; note = cytidine-3'-phosphate
  modified_base 13: mod_base = OTHER; note = uridine-3'-phosphate
  modified_base 14: mod_base = OTHER; note = uridine-3'-phosphate
  modified_base 15: mod_base = OTHER; note = guanosine-3'-phosphate
  modified_base 16: mod_base = OTHER; note = adenosine-3'-phosphate
  modified_base 17: mod_base = OTHER; note = adenosine-3'-phosphate
  modified_base 18: mod_base = OTHER; note = guanosine-3'-phosphate
  modified_base 19: mod_base = OTHER; note = uridine-3'-phosphate
  misc_feature 1..19: note = RNA
  misc_feature 20..21: note = DNA
ttagacggaatcttgaagttt

SEQ ID NO: 2366 - DNA, 21 bp, synthetic construct
  source 1..21: mol_type = other DNA
  modified_base 1: mod_base = OTHER; note = cytidine-3'-phosphate
  modified_base 2: mod_base = OTHER; note = adenosine-3'-phosphate
  modified_base 3: mod_base = OTHER; note = uridine-3'-phosphate
  modified_base 4: mod_base = OTHER; note = adenosine-3'-phosphate
  modified_base 5: mod_base = OTHER; note = uridine-3'-phosphate
  modified_base 6: mod_base = OTHER; note = cytidine-3'-phosphate
  modified_base 7: mod_base = OTHER; note = uridine-3'-phosphate
  modified_base 8: mod_base = OTHER; note = adenosine-3'-phosphate
  modified_base 9: mod_base = OTHER; note = guanosine-3'-phosphate
  modified_base 10: mod_base = OTHER; note = guanosine-3'-phosphate
  modified_base 11: mod_base = OTHER; note = adenosine-3'-phosphate
  modified_base 12: mod_base = OTHER; note = uridine-3'-phosphate
  modified_base 13: mod_base = OTHER; note = uridine-3'-phosphate
  modified_base 14: mod_base = OTHER; note = adenosine-3'-phosphate
  modified_base 15: mod_base = OTHER; note = guanosine-3'-phosphate
  modified_base 16: mod_base = OTHER; note = adenosine-3'-phosphate
  modified_base 17: mod_base = OTHER; note = cytidine-3'-phosphate
  modified_base 18: mod_base = OTHER; note = guanosine-3'-phosphate
  modified_base 19: mod_base = OTHER; note = guanosine-3'-phosphate
  misc_feature 1..19: note = RNA
  misc_feature 20..21: note = DNA
catatctaggattagacggtt

SEQ ID NO: 2367 - DNA, 21 bp, synthetic construct
  source 1..21: mol_type = other DNA
  modified_base 1: mod_base = OTHER; note = uridine-3'-phosphate
  modified_base 2: mod_base = OTHER; note = cytidine-3'-phosphate
  modified_base 3: mod_base = OTHER; note = cytidine-3'-phosphate
  modified_base 4: mod_base = OTHER; note = adenosine-3'-phosphate
  modified_base 5: mod_base = OTHER; note = cytidine-3'-phosphate
  modified_base 6: mod_base = OTHER; note = adenosine-3'-phosphate
  modified_base 7: mod_base = OTHER; note = uridine-3'-phosphate
  modified_base 8: mod_base = OTHER; note = adenosine-3'-phosphate
  modified_base 9: mod_base = OTHER; note = cytidine-3'-phosphate
  modified_base 10: mod_base = OTHER; note = cytidine-3'-phosphate
  modified_base 11: mod_base = OTHER; note = adenosine-3'-phosphate
  modified_base 12: mod_base = OTHER; note = uridine-3'-phosphate
  modified_base 13: mod_base = OTHER; note = adenosine-3'-phosphate
  modified_base 14: mod_base = OTHER; note = uridine-3'-phosphate
  modified_base 15: mod_base = OTHER; note = cytidine-3'-phosphate
  modified_base 16: mod_base = OTHER; note = uridine-3'-phosphate
  modified_base 17: mod_base = OTHER; note = adenosine-3'-phosphate
  modified_base 18: mod_base = OTHER; note = guanosine-3'-phosphate
  modified_base 19: mod_base = OTHER; note = guanosine-3'-phosphate
  misc_feature 1..19: note = RNA
  misc_feature 20..21: note = DNA
tccacataccatatctaggtt

SEQ ID NO: 2368 - DNA, 21 bp, synthetic construct
  source 1..21: mol_type = other DNA
  modified_base 1: mod_base = OTHER; note = uridine-3'-phosphate
  modified_base 2: mod_base = OTHER; note = uridine-3'-phosphate
  modified_base 3: mod_base = OTHER; note = adenosine-3'-phosphate
  modified_base 4: mod_base = OTHER; note = guanosine-3'-phosphate
  modified_base 5: mod_base = OTHER; note = cytidine-3'-phosphate
  modified_base 6: mod_base = OTHER; note = cytidine-3'-phosphate
  modified_base 7: mod_base = OTHER; note = uridine-3'-phosphate
  modified_base 8: mod_base = OTHER; note = uridine-3'-phosphate
  modified_base 9: mod_base = OTHER; note = guanosine-3'-phosphate
  modified_base 10: mod_base = OTHER; note = adenosine-3'-phosphate
  modified_base 11: mod_base = OTHER; note = uridine-3'-phosphate
  modified_base 12: mod_base = OTHER; note = cytidine-3'-phosphate
  modified_base 13: mod_base = OTHER; note = guanosine-3'-phosphate
  modified_base 14: mod_base = OTHER; note = uridine-3'-phosphate
  modified_base 15: mod_base = OTHER; note = cytidine-3'-phosphate
  modified_base 16: mod_base = OTHER; note = cytidine-3'-phosphate
  modified_base 17: mod_base = OTHER; note = adenosine-3'-phosphate
  modified_base 18: mod_base = OTHER; note = cytidine-3'-phosphate
  modified_base 19: mod_base = OTHER; note = adenosine-3'-phosphate
  misc_feature 1..19: note = RNA
  misc_feature 20..21: note = DNA
ttagccttgatcgtccacatt

SEQ ID NO: 2369 - DNA, 21 bp, synthetic construct
  source 1..21: mol_type = other DNA
  modified_base 1: mod_base = OTHER; note = uridine-3'-phosphate
  modified_base 2: mod_base = OTHER; note = uridine-3'-phosphate
  modified_base 3: mod_base = OTHER; note = adenosine-3'-phosphate
  modified_base 4: mod_base = OTHER; note = uridine-3'-phosphate
  modified_base 5: mod_base = OTHER; note = adenosine-3'-phosphate
  modified_base 6: mod_base = OTHER; note = uridine-3'-phosphate
  modified_base 7: mod_base = OTHER; note = uridine-3'-phosphate
  modified_base 8: mod_base = OTHER; note = uridine-3'-phosphate
  modified_base 9: mod_base = OTHER; note = adenosine-3'-phosphate
  modified_base 10: mod_base = OTHER; note = guanosine-3'-phosphate
  modified_base 11: mod_base = OTHER; note = cytidine-3'-phosphate
  modified_base 12: mod_base = OTHER; note = cytidine-3'-phosphate
  modified_base 13: mod_base = OTHER; note = uridine-3'-phosphate
  modified_base 14: mod_base = OTHER; note = uridine-3'-phosphate
  modified_base 15: mod_base = OTHER; note = guanosine-3'-phosphate
  modified_base 16: mod_base = OTHER; note = adenosine-3'-phosphate
  modified_base 17: mod_base = OTHER; note = uridine-3'-phosphate
  modified_base 18: mod_base = OTHER; note = cytidine-3'-phosphate
  modified_base 19: mod_base = OTHER; note = guanosine-3'-phosphate
  misc_feature 1..19: note = RNA
  misc_feature 20..21: note = DNA
ttatatttagccttgatcgtt

SEQ ID NO: 2370 - DNA, 21 bp, synthetic construct
  source 1..21: mol_type = other DNA
  modified_base 1: mod_base = OTHER; note = uridine-3'-phosphate
  modified_base 2: mod_base = OTHER; note = guanosine-3'-phosphate
  modified_base 3: mod_base = OTHER; note = adenosine-3'-phosphate
  modified_base 4: mod_base = OTHER; note = adenosine-3'-phosphate
  modified_base 5: mod_base = OTHER; note = adenosine-3'-phosphate
  modified_base 6: mod_base = OTHER; note = adenosine-3'-phosphate
  modified_base 7: mod_base = OTHER; note = guanosine-3'-phosphate
  modified_base 8: mod_base = OTHER; note = uridine-3'-phosphate
  modified_base 9: mod_base = OTHER; note = cytidine-3'-phosphate
  modified_base 10: mod_base = OTHER; note = cytidine-3'-phosphate
  modified_base 11: mod_base = OTHER; note = uridine-3'-phosphate
  modified_base 12: mod_base = OTHER; note = cytidine-3'-phosphate
  modified_base 13: mod_base = OTHER; note = uridine-3'-phosphate
  modified_base 14: mod_base = OTHER; note = uridine-3'-phosphate
  modified_base 15: mod_base = OTHER; note = uridine-3'-phosphate
  modified_base 16: mod_base = OTHER; note = adenosine-3'-phosphate
  modified_base 17: mod_base = OTHER; note = uridine-3'-phosphate
  modified_base 18: mod_base = OTHER; note = adenosine-3'-phosphate
  modified_base 19: mod_base = OTHER; note = uridine-3'-phosphate
  misc_feature 1..19: note = RNA
  misc_feature 20..21: note = DNA
tgaaaagtcctctttatattt

SEQ ID NO: 2371 - DNA, 21 bp, synthetic construct
  source 1..21: mol_type = other DNA
  modified_base 1: mod_base = OTHER; note = cytidine-3'-phosphate
  modified_base 2: mod_base = OTHER; note = adenosine-3'-phosphate
  modified_base 3: mod_base = OTHER; note = guanosine-3'-phosphate
  modified_base 4: mod_base = OTHER; note = uridine-3'-phosphate
  modified_base 5: mod_base = OTHER; note = uridine-3'-phosphate
  modified_base 6: mod_base = OTHER; note = guanosine-3'-phosphate
  modified_base 7: mod_base = OTHER; note = uridine-3'-phosphate
  modified_base 8: mod_base = OTHER; note = uridine-3'-phosphate
  modified_base 9: mod_base = OTHER; note = guanosine-3'-phosphate
  modified_base 10: mod_base = OTHER; note = adenosine-3'-phosphate
  modified_base 11: mod_base = OTHER; note = adenosine-3'-phosphate
  modified_base 12: mod_base = OTHER; note = adenosine-3'-phosphate
  modified_base 13: mod_base = OTHER; note = adenosine-3'-phosphate
  modified_base 14: mod_base = OTHER; note = guanosine-3'-phosphate
  modified_base 15: mod_base = OTHER; note = uridine-3'-phosphate
  modified_base 16: mod_base = OTHER; note = cytidine-3'-phosphate
  modified_base 17: mod_base = OTHER; note = cytidine-3'-phosphate
  modified_base 18: mod_base = OTHER; note = uridine-3'-phosphate
  modified_base 19: mod_base = OTHER; note = cytidine-3'-phosphate
  misc_feature 1..19: note = RNA
  misc_feature 20..21: note = DNA
cagttgttgaaaagtcctctt

SEQ ID NO: 2372 - DNA, 21 bp, synthetic construct
  source 1..21: mol_type = other DNA
  modified_base 1: mod_base = OTHER; note = adenosine-3'-phosphate
  modified_base 2: mod_base = OTHER; note = adenosine-3'-phosphate
  modified_base 3: mod_base = OTHER; note = adenosine-3'-phosphate
  modified_base 4: mod_base = OTHER; note = uridine-3'-phosphate
  modified_base 5: mod_base = OTHER; note = adenosine-3'-phosphate
  modified_base 6: mod_base = OTHER; note = uridine-3'-phosphate
  modified_base 7: mod_base = OTHER; note = guanosine-3'-phosphate
  modified_base 8: mod_base = OTHER; note = cytidine-3'-phosphate
  modified_base 9: mod_base = OTHER; note = guanosine-3'-phosphate
  modified_base 10: mod_base = OTHER; note = guanosine-3'-phosphate
  modified_base 11: mod_base = OTHER; note = uridine-3'-phosphate
  modified_base 12: mod_base = OTHER; note = uridine-3'-phosphate
  modified_base 13: mod_base = OTHER; note = cytidine-3'-phosphate
  modified_base 14: mod_base = OTHER; note = cytidine-3'-phosphate
  modified_base 15: mod_base = OTHER; note = adenosine-3'-phosphate
  modified_base 16: mod_base = OTHER; note = guanosine-3'-phosphate
  modified_base 17: mod_base = OTHER; note = uridine-3'-phosphate
  modified_base 18: mod_base = OTHER; note = uridine-3'-phosphate
  modified_base 19: mod_base = OTHER; note = guanosine-3'-phosphate
  misc_feature 1..19: note = RNA
  misc_feature 20..21: note = DNA
aaatatgcggttccagttgtt

SEQ ID NO: 2373 - DNA, 21 bp, synthetic construct
  source 1..21: mol_type = other DNA
  modified_base 1: mod_base = OTHER; note = uridine-3'-phosphate
  modified_base 2: mod_base = OTHER; note = uridine-3'-phosphate
  modified_base 3: mod_base = OTHER; note = uridine-3'-phosphate
  modified_base 4: mod_base = OTHER; note = adenosine-3'-phosphate
  modified_base 5: mod_base = OTHER; note = adenosine-3'-phosphate
  modified_base 6: mod_base = OTHER; note = cytidine-3'-phosphate
  modified_base 7: mod_base = OTHER; note = uridine-3'-phosphate
  modified_base 8: mod_base = OTHER; note = uridine-3'-phosphate
  modified_base 9: mod_base = OTHER; note = cytidine-3'-phosphate
  modified_base 10: mod_base = OTHER; note = adenosine-3'-phosphate
  modified_base 11: mod_base = OTHER; note = adenosine-3'-phosphate
  modified_base 12: mod_base = OTHER; note = adenosine-3'-phosphate
  modified_base 13: mod_base = OTHER; note = adenosine-3'-phosphate
  modified_base 14: mod_base = OTHER; note = uridine-3'-phosphate
  modified_base 15: mod_base = OTHER; note = adenosine-3'-phosphate
  modified_base 16: mod_base = OTHER; note = uridine-3'-phosphate
  modified_base 17: mod_base = OTHER; note = guanosine-3'-phosphate
  modified_base 18: mod_base = OTHER; note = cytidine-3'-phosphate
  modified_base 19: mod_base = OTHER; note = guanosine-3'-phosphate
  misc_feature 1..19: note = RNA
  misc_feature 20..21: note = DNA
tttaacttcaaaatatgcgtt

SEQ ID NO: 2374 - DNA, 21 bp, synthetic construct
  source 1..21: mol_type = other DNA
  modified_base 1: mod_base = OTHER; note = adenosine-3'-phosphate
  modified_base 2: mod_base = OTHER; note = adenosine-3'-phosphate
  modified_base 3: mod_base = OTHER; note = guanosine-3'-phosphate
  modified_base 4: mod_base = OTHER; note = adenosine-3'-phosphate
  modified_base 5: mod_base = OTHER; note = cytidine-3'-phosphate
  modified_base 6: mod_base = OTHER; note = adenosine-3'-phosphate
  modified_base 7: mod_base = OTHER; note = uridine-3'-phosphate
  modified_base 8: mod_base = OTHER; note = adenosine-3'-phosphate
  modified_base 9: mod_base = OTHER; note = uridine-3'-phosphate
  modified_base 10: mod_base = OTHER; note = uridine-3'-phosphate
  modified_base 11: mod_base = OTHER; note = cytidine-3'-phosphate
  modified_base 12: mod_base = OTHER; note = uridine-3'-phosphate
  modified_base 13: mod_base = OTHER; note = uridine-3'-phosphate
  modified_base 14: mod_base = OTHER; note = uridine-3'-phosphate
  modified_base 15: mod_base = OTHER; note = adenosine-3'-phosphate
  modified_base 16: mod_base = OTHER; note = adenosine-3'-phosphate
  modified_base 17: mod_base = OTHER; note = cytidine-3'-phosphate
  modified_base 18: mod_base = OTHER; note = uridine-3'-phosphate
  modified_base 19: mod_base = OTHER; note = uridine-3'-phosphate
  misc_feature 1..19: note = RNA
  misc_feature 20..21: note = DNA
aagacatattctttaactttt

SEQ ID NO: 2375 - DNA, 21 bp, synthetic construct
  source 1..21: mol_type = other DNA
  modified_base 1: mod_base = OTHER; note = adenosine-3'-phosphate
  modified_base 2: mod_base = OTHER; note = adenosine-3'-phosphate
  modified_base 3: mod_base = OTHER; note = uridine-3'-phosphate
  modified_base 4: mod_base = OTHER; note = guanosine-3'-phosphate
  modified_base 5: mod_base = OTHER; note = uridine-3'-phosphate
  modified_base 6: mod_base = OTHER; note = guanosine-3'-phosphate
  modified_base 7: mod_base = OTHER; note = guanosine-3'-phosphate
  modified_base 8: mod_base = OTHER; note = cytidine-3'-phosphate
  modified_base 9: mod_base = OTHER; note = adenosine-3'-phosphate
  modified_base 10: mod_base = OTHER; note = adenosine-3'-phosphate
  modified_base 11: mod_base = OTHER; note = guanosine-3'-phosphate
  modified_base 12: mod_base = OTHER; note = adenosine-3'-phosphate
  modified_base 13: mod_base = OTHER; note = cytidine-3'-phosphate
  modified_base 14: mod_base = OTHER; note = adenosine-3'-phosphate
  modified_base 15: mod_base = OTHER; note = uridine-3'-phosphate
  modified_base 16: mod_base = OTHER; note = adenosine-3'-phosphate
  modified_base 17: mod_base = OTHER; note = uridine-3'-phosphate
  modified_base 18: mod_base = OTHER; note = uridine-3'-phosphate
  modified_base 19: mod_base = OTHER; note = cytidine-3'-phosphate
  misc_feature 1..19: note = RNA
  misc_feature 20..21: note = DNA
aatgtggcaagacatattctt

SEQ ID NO: 2376 - DNA, 21 bp, synthetic construct
  source 1..21: mol_type = other DNA
  modified_base 1: mod_base = OTHER; note = uridine-3'-phosphate
  modified_base 2: mod_base = OTHER; note = uridine-3'-phosphate
  modified_base 3: mod_base = OTHER; note = guanosine-3'-phosphate
  modified_base 4: mod_base = OTHER; note = adenosine-3'-phosphate
  modified_base 5: mod_base = OTHER; note = guanosine-3'-phosphate
  modified_base 6: mod_base = OTHER; note = adenosine-3'-phosphate
  modified_base 7: mod_base = OTHER; note = cytidine-3'-phosphate
  modified_base 8: mod_base = OTHER; note = adenosine-3'-phosphate
  modified_base 9: mod_base = OTHER; note = guanosine-3'-phosphate
  modified_base 10: mod_base = OTHER; note = adenosine-3'-phosphate
  modified_base 11: mod_base = OTHER; note = adenosine-3'-phosphate
  modified_base 12: mod_base = OTHER; note = adenosine-3'-phosphate
  modified_base 13: mod_base = OTHER; note = adenosine-3'-phosphate
  modified_base 14: mod_base = OTHER; note = adenosine-3'-phosphate
  modified_base 15: mod_base = OTHER; note = uridine-3'-phosphate
  modified_base 16: mod_base = OTHER; note = guanosine-3'-phosphate
  modified_base 17: mod_base = OTHER; note = uridine-3'-phosphate
  modified_base 18: mod_base = OTHER; note = guanosine-3'-phosphate
  modified_base 19: mod_base = OTHER; note = guanosine-3'-phosphate
  misc_feature 1..19: note = RNA
  misc_feature 20..21: note = DNA
ttgagacagaaaaatgtggtt

SEQ ID NO: 2377 - DNA, 21 bp, synthetic construct
  source 1..21: mol_type = other DNA
  modified_base 1: mod_base = OTHER; note = uridine-3'-phosphate
  modified_base 2: mod_base = OTHER; note = cytidine-3'-phosphate
  modified_base 3: mod_base = OTHER; note = uridine-3'-phosphate
  modified_base 4: mod_base = OTHER; note = guanosine-3'-phosphate
  modified_base 5: mod_base = OTHER; note = guanosine-3'-phosphate
  modified_base 6: mod_base = OTHER; note = cytidine-3'-phosphate
  modified_base 7: mod_base = OTHER; note = uridine-3'-phosphate
  modified_base 8: mod_base = OTHER; note = cytidine-3'-phosphate
  modified_base 9: mod_base = OTHER; note = guanosine-3'-phosphate
  modified_base 10: mod_base = OTHER; note = adenosine-3'-phosphate
  modified_base 11: mod_base = OTHER; note = uridine-3'-phosphate
  modified_base 12: mod_base = OTHER; note = uridine-3'-phosphate
  modified_base 13: mod_base = OTHER; note = guanosine-3'-phosphate
  modified_base 14: mod_base = OTHER; note = adenosine-3'-phosphate
  modified_base 15: mod_base = OTHER; note = guanosine-3'-phosphate
  modified_base 16: mod_base = OTHER; note = adenosine-3'-phosphate
  modified_base 17: mod_base = OTHER; note = cytidine-3'-phosphate
  modified_base 18: mod_base = OTHER; note = adenosine-3'-phosphate
  modified_base 19: mod_base = OTHER; note = guanosine-3'-phosphate
  misc_feature 1..19: note = RNA
  misc_feature 20..21: note = DNA
tctggctcgattgagacagtt

SEQ ID NO: 2378 - DNA, 21 bp, synthetic construct
  source 1..21: mol_type = other DNA
  modified_base 1: mod_base = OTHER; note = uridine-3'-phosphate
  modified_base 2: mod_base = OTHER; note = uridine-3'-phosphate
  modified_base 3: mod_base = OTHER; note = adenosine-3'-phosphate
  modified_base 4: mod_base = OTHER; note = uridine-3'-phosphate
  modified_base 5: mod_base = OTHER; note = adenosine-3'-phosphate
  modified_base 6: mod_base = OTHER; note = uridine-3'-phosphate
  modified_base 7: mod_base = OTHER; note = uridine-3'-phosphate
  modified_base 8: mod_base = OTHER; note = cytidine-3'-phosphate
  modified_base 9: mod_base = OTHER; note = uridine-3'-phosphate
  modified_base 10: mod_base = OTHER; note = guanosine-3'-phosphate
  modified_base 11: mod_base = OTHER; note = guanosine-3'-phosphate
  modified_base 12: mod_base = OTHER; note = cytidine-3'-phosphate
  modified_base 13: mod_base = OTHER; note = uridine-3'-phosphate
  modified_base 14: mod_base = OTHER; note = cytidine-3'-phosphate
  modified_base 15: mod_base = OTHER; note = guanosine-3'-phosphate
  modified_base 16: mod_base = OTHER; note = adenosine-3'-phosphate
  modified_base 17: mod_base = OTHER; note = uridine-3'-phosphate
  modified_base 18: mod_base = OTHER; note = uridine-3'-phosphate
  modified_base 19: mod_base = OTHER; note = guanosine-3'-phosphate
  misc_feature 1..19: note = RNA
  misc_feature 20..21: note = DNA
ttatattctggctcgattgtt

SEQ ID NO: 2379 - DNA, 21 bp, synthetic construct
  source 1..21: mol_type = other DNA
  modified_base 1: mod_base = OTHER; note = adenosine-3'-phosphate
  modified_base 2: mod_base = OTHER; note = adenosine-3'-phosphate
  modified_base 3: mod_base = OTHER; note = cytidine-3'-phosphate
  modified_base 4: mod_base = OTHER; note = cytidine-3'-phosphate
  modified_base 5: mod_base = OTHER; note = adenosine-3'-phosphate
  modified_base 6: mod_base = OTHER; note = adenosine-3'-phosphate
  modified_base 7: mod_base = OTHER; note = uridine-3'-phosphate
  modified_base 8: mod_base = OTHER; note = guanosine-3'-phosphate
  modified_base 9: mod_base = OTHER; note = adenosine-3'-phosphate
  modified_base 10: mod_base = OTHER; note = adenosine-3'-phosphate
  modified_base 11: mod_base = OTHER; note = adenosine-3'-phosphate
  modified_base 12: mod_base = OTHER; note = uridine-3'-phosphate
  modified_base 13: mod_base = OTHER; note = uridine-3'-phosphate
  modified_base 14: mod_base = OTHER; note = adenosine-3'-phosphate
  modified_base 15: mod_base = OTHER; note = uridine-3'-phosphate
  modified_base 16: mod_base = OTHER; note = adenosine-3'-phosphate
  modified_base 17: mod_base = OTHER; note = uridine-3'-phosphate
  modified_base 18: mod_base = OTHER; note = uridine-3'-phosphate
  modified_base 19: mod_base = OTHER; note = cytidine-3'-phosphate
  misc_feature 1..19: note = RNA
  misc_feature 20..21: note = DNA
aaccaatgaaattatattctt

SEQ ID NO: 2380 - DNA, 21 bp, synthetic construct
  source 1..21: mol_type = other DNA
  modified_base 1: mod_base = OTHER; note = uridine-3'-phosphate
  modified_base 2: mod_base = OTHER; note = adenosine-3'-phosphate
  modified_base 3: mod_base = OTHER; note = adenosine-3'-phosphate
  modified_base 4: mod_base = OTHER; note = adenosine-3'-phosphate
  modified_base 5: mod_base = OTHER; note = guanosine-3'-phosphate
  modified_base 6: mod_base = OTHER; note = uridine-3'-phosphate
  modified_base 7: mod_base = OTHER; note = uridine-3'-phosphate
  modified_base 8: mod_base = OTHER; note = cytidine-3'-phosphate
  modified_base 9: mod_base = OTHER; note = uridine-3'-phosphate
  modified_base 10: mod_base = OTHER; note = uridine-3'-phosphate
  modified_base 11: mod_base = OTHER; note = guanosine-3'-phosphate
  modified_base 12: mod_base = OTHER; note = uridine-3'-phosphate
  modified_base 13: mod_base = OTHER; note = adenosine-3'-phosphate
  modified_base 14: mod_base = OTHER; note = adenosine-3'-phosphate
  modified_base 15: mod_base = OTHER; note = cytidine-3'-phosphate
  modified_base 16: mod_base = OTHER; note = cytidine-3'-phosphate
  modified_base 17: mod_base = OTHER; note = adenosine-3'-phosphate
  modified_base 18: mod_base = OTHER; note = adenosine-3'-phosphate
  modified_base 19: mod_base = OTHER; note = uridine-3'-phosphate
  misc_feature 1..19: note = RNA
  misc_feature 20..21: note = DNA
taaagttcttgtaaccaattt

SEQ ID NO: 2381 - DNA, 21 bp, synthetic construct
  source 1..21: mol_type = other DNA
  modified_base 1: mod_base = OTHER; note = uridine-3'-phosphate
  modified_base 2: mod_base = OTHER; note = cytidine-3'-phosphate
  modified_base 3: mod_base = OTHER; note = adenosine-3'-phosphate
  modified_base 4: mod_base = OTHER; note = adenosine-3'-phosphate
  modified_base 5: mod_base = OTHER; note = adenosine-3'-phosphate
  modified_base 6: mod_base = OTHER; note = adenosine-3'-phosphate
  modified_base 7: mod_base = OTHER; note = uridine-3'-phosphate
  modified_base 8: mod_base = OTHER; note = uridine-3'-phosphate
  modified_base 9: mod_base = OTHER; note = cytidine-3'-phosphate
  modified_base 10: mod_base = OTHER; note = uridine-3'-phosphate
  modified_base 11: mod_base = OTHER; note = uridine-3'-phosphate
  modified_base 12: mod_base = OTHER; note = adenosine-3'-phosphate
  modified_base 13: mod_base = OTHER; note = adenosine-3'-phosphate
  modified_base 14: mod_base = OTHER; note = adenosine-3'-phosphate
  modified_base 15: mod_base = OTHER; note = guanosine-3'-phosphate
  modified_base 16: mod_base = OTHER; note = uridine-3'-phosphate
  modified_base 17: mod_base = OTHER; note = uridine-3'-phosphate
  modified_base 18: mod_base = OTHER; note = cytidine-3'-phosphate
  modified_base 19: mod_base = OTHER; note = uridine-3'-phosphate
  misc_feature 1..19: note = RNA
  misc_feature 20..21: note = DNA
tcaaaattcttaaagttcttt

SEQ ID NO: 2382 - DNA, 21 bp, synthetic construct
  source 1..21: mol_type = other DNA
  modified_base 1: mod_base = OTHER; note = uridine-3'-phosphate
  modified_base 2: mod_base = OTHER; note = adenosine-3'-phosphate
  modified_base 3: mod_base = OTHER; note = uridine-3'-phosphate
  modified_base 4: mod_base = OTHER; note = adenosine-3'-phosphate
  modified_base 5: mod_base = OTHER; note = guanosine-3'-phosphate
  modified_base 6: mod_base = OTHER; note = uridine-3'-phosphate
  modified_base 7: mod_base = OTHER; note = adenosine-3'-phosphate
  modified_base 8: mod_base = OTHER; note = adenosine-3'-phosphate
  modified_base 9: mod_base = OTHER; note = uridine-3'-phosphate
  modified_base 10: mod_base = OTHER; note = uridine-3'-phosphate
  modified_base 11: mod_base = OTHER; note = uridine-3'-phosphate
  modified_base 12: mod_base = OTHER; note = cytidine-3'-phosphate
  modified_base 13: mod_base = OTHER; note = adenosine-3'-phosphate
  modified_base 14: mod_base = OTHER; note = adenosine-3'-phosphate
  modified_base 15: mod_base = OTHER; note = adenosine-3'-phosphate
  modified_base 16: mod_base = OTHER; note = adenosine-3'-phosphate
  modified_base 17: mod_base = OTHER; note = uridine-3'-phosphate
  modified_base 18: mod_base = OTHER; note = uridine-3'-phosphate
  modified_base 19: mod_base = OTHER; note = cytidine-3'-phosphate
  misc_feature 1..19: note = RNA
  misc_feature 20..21: note = DNA
tatagtaatttcaaaattctt

SEQ ID NO: 2383 - DNA, 21 bp, synthetic construct
  source 1..21: mol_type = other DNA
  modified_base 1: mod_base = OTHER; note = uridine-3'-phosphate
  modified_base 2: mod_base = OTHER; note = uridine-3'-phosphate
  modified_base 3: mod_base = OTHER; note = guanosine-3'-phosphate
  modified_base 4: mod_base = OTHER; note = cytidine-3'-phosphate
  modified_base 5: mod_base = OTHER; note = uridine-3'-phosphate
  modified_base 6: mod_base = OTHER; note = uridine-3'-phosphate
  modified_base 7: mod_base = OTHER; note = uridine-3'-phosphate
  modified_base 8: mod_base = OTHER; note = uridine-3'-phosphate
  modified_base 9: mod_base = OTHER; note = adenosine-3'-phosphate
  modified_base 10: mod_base = OTHER; note = uridine-3'-phosphate
  modified_base 11: mod_base = OTHER; note = adenosine-3'-phosphate
  modified_base 12: mod_base = OTHER; note = guanosine-3'-phosphate
  modified_base 13: mod_base = OTHER; note = uridine-3'-phosphate
  modified_base 14: mod_base = OTHER; note = adenosine-3'-phosphate
  modified_base 15: mod_base = OTHER; note = adenosine-3'-phosphate
  modified_base 16: mod_base = OTHER; note = uridine-3'-phosphate
  modified_base 17: mod_base = OTHER; note = uridine-3'-phosphate
  modified_base 18: mod_base = OTHER; note = uridine-3'-phosphate
  modified_base 19: mod_base = OTHER; note = cytidine-3'-phosphate
  misc_feature 1..19: note = RNA
  misc_feature 20..21: note = DNA
ttgcttttatagtaatttctt

SEQ ID NO: 2384 - DNA, 21 bp, synthetic construct
  source 1..21: mol_type = other DNA
  modified_base 1: mod_base = OTHER; note = uridine-3'-phosphate
  modified_base 2: mod_base = OTHER; note = adenosine-3'-phosphate
  modified_base 3: mod_base = OTHER; note = uridine-3'-phosphate
  modified_base 4: mod_base = OTHER; note = adenosine-3'-phosphate
  modified_base 5: mod_base = OTHER; note = adenosine-3'-phosphate
  modified_base 6: mod_base = OTHER; note = adenosine-3'-phosphate
  modified_base 7: mod_base = OTHER; note = adenosine-3'-phosphate
  modified_base 8: mod_base = OTHER; note = adenosine-3'-phosphate
  modified_base 9: mod_base = OTHER; note = uridine-3'-phosphate
  modified_base 10: mod_base = OTHER; note = adenosine-3'-phosphate
  modified_base 11: mod_base = OTHER; note = uridine-3'-phosphate
  modified_base 12: mod_base = OTHER; note = cytidine-3'-phosphate
  modified_base 13: mod_base = OTHER; note = uridine-3'-phosphate
  modified_base 14: mod_base = OTHER; note = uridine-3'-phosphate
  modified_base 15: mod_base = OTHER; note = guanosine-3'-phosphate
  modified_base 16: mod_base = OTHER; note = cytidine-3'-phosphate
  modified_base 17: mod_base = OTHER; note = uridine-3'-phosphate
  modified_base 18: mod_base = OTHER; note = uridine-3'-phosphate
  modified_base 19: mod_base = OTHER; note = uridine-3'-phosphate
  misc_feature 1..19: note = RNA
  misc_feature 20..21: note = DNA
tataaaaatatcttgcttttt

SEQ ID NO: 2385 - DNA, 21 bp, synthetic construct
  source 1..21: mol_type = other DNA
  modified_base 1: mod_base = OTHER; note = uridine-3'-phosphate
  modified_base 2: mod_base = OTHER; note = adenosine-3'-phosphate
  modified_base 3: mod_base = OTHER; note = cytidine-3'-phosphate
  modified_base 4: mod_base = OTHER; note = uridine-3'-phosphate
  modified_base 5: mod_base = OTHER; note = uridine-3'-phosphate
  modified_base 6: mod_base = OTHER; note = uridine-3'-phosphate
  modified_base 7: mod_base = OTHER; note = adenosine-3'-phosphate
  modified_base 8: mod_base = OTHER; note = uridine-3'-phosphate
  modified_base 9: mod_base = OTHER; note = uridine-3'-phosphate
  modified_base 10: mod_base = OTHER; note = adenosine-3'-phosphate
  modified_base 11: mod_base = OTHER; note = uridine-3'-phosphate
  modified_base 12: mod_base = OTHER; note = adenosine-3'-phosphate
  modified_base 13: mod_base = OTHER; note = adenosine-3'-phosphate
  modified_base 14: mod_base = OTHER; note = adenosine-3'-phosphate
  modified_base 15: mod_base = OTHER; note = adenosine-3'-phosphate
  modified_base 16: mod_base = OTHER; note = adenosine-3'-phosphate
  modified_base 17: mod_base = OTHER; note = uridine-3'-phosphate
  modified_base 18: mod_base = OTHER; note = adenosine-3'-phosphate
  modified_base 19: mod_base = OTHER; note = uridine-3'-phosphate
  misc_feature 1..19: note = RNA
  misc_feature 20..21: note = DNA
tactttattataaaaatattt

SEQ ID NO: 2386 - DNA, 21 bp, synthetic construct
  source 1..21: mol_type = other DNA
  modified_base 1: mod_base = OTHER; note = uridine-3'-phosphate
  modified_base 2: mod_base = OTHER; note = cytidine-3'-phosphate
  modified_base 3: mod_base = OTHER; note = adenosine-3'-phosphate
  modified_base 4: mod_base = OTHER; note = guanosine-3'-phosphate
  modified_base 5: mod_base = OTHER; note = cytidine-3'-phosphate
  modified_base 6: mod_base = OTHER; note = cytidine-3'-phosphate
  modified_base 7: mod_base = OTHER; note = uridine-3'-phosphate
  modified_base 8: mod_base = OTHER; note = cytidine-3'-phosphate
  modified_base 9: mod_base = OTHER; note = adenosine-3'-phosphate
  modified_base 10: mod_base = OTHER; note = guanosine-3'-phosphate
  modified_base 11: mod_base = OTHER; note = uridine-3'-phosphate
  modified_base 12: mod_base = OTHER; note = guanosine-3'-phosphate
  modified_base 13: mod_base = OTHER; note = adenosine-3'-phosphate
  modified_base 14: mod_base = OTHER; note = cytidine-3'-phosphate
  modified_base 15: mod_base = OTHER; note = uridine-3'-phosphate
  modified_base 16: mod_base = OTHER; note = adenosine-3'-phosphate
  modified_base 17: mod_base = OTHER; note = cytidine-3'-phosphate
  modified_base 18: mod_base = OTHER; note = uridine-3'-phosphate
  modified_base 19: mod_base = OTHER; note = uridine-3'-phosphate
  misc_feature 1..19: note = RNA
  misc_feature 20..21: note = DNA
tcagcctcagtgactactttt

SEQ ID NO: 2387 - DNA, 21 bp, synthetic construct
  source 1..21: mol_type = other DNA
  modified_base 1: mod_base = OTHER; note = adenosine-3'-phosphate
  modified_base 2: mod_base = OTHER; note = uridine-3'-phosphate
  modified_base 3: mod_base = OTHER; note = adenosine-3'-phosphate
  modified_base 4: mod_base = OTHER; note = adenosine-3'-phosphate
  modified_base 5: mod_base = OTHER; note = adenosine-3'-phosphate
  modified_base 6: mod_base = OTHER; note = cytidine-3'-phosphate
  modified_base 7: mod_base = OTHER; note = guanosine-3'-phosphate
  modified_base 8: mod_base = OTHER; note = uridine-3'-phosphate
  modified_base 9: mod_base = OTHER; note = cytidine-3'-phosphate
  modified_base 10: mod_base = OTHER; note = adenosine-3'-phosphate
  modified_base 11: mod_base = OTHER; note = guanosine-3'-phosphate
  modified_base 12: mod_base = OTHER; note = cytidine-3'-phosphate
  modified_base 13: mod_base = OTHER; note = cytidine-3'-phosphate
  modified_base 14: mod_base = OTHER; note = uridine-3'-phosphate
  modified_base 15: mod_base = OTHER; note = cytidine-3'-phosphate
  modified_base 16: mod_base = OTHER; note = adenosine-3'-phosphate
  modified_base 17: mod_base = OTHER; note = guanosine-3'-phosphate
  modified_base 18: mod_base = OTHER; note = uridine-3'-phosphate
  modified_base 19: mod_base = OTHER; note = guanosine-3'-phosphate
  misc_feature 1..19: note = RNA
  misc_feature 20..21: note = DNA
ataaacgtcagcctcagtgtt

SEQ ID NO: 2388 - DNA, 21 bp, synthetic construct
  source 1..21: mol_type = other DNA
  modified_base 1: mod_base = OTHER; note = uridine-3'-phosphate
  modified_base 2: mod_base = OTHER; note = cytidine-3'-phosphate
  modified_base 3: mod_base = OTHER; note = cytidine-3'-phosphate
  modified_base 4: mod_base = OTHER; note = adenosine-3'-phosphate
  modified_base 5: mod_base = OTHER; note = adenosine-3'-phosphate
  modified_base 6: mod_base = OTHER; note = adenosine-3'-phosphate
  modified_base 7: mod_base = OTHER; note = uridine-3'-phosphate
  modified_base 8: mod_base = OTHER; note = guanosine-3'-phosphate
  modified_base 9: mod_base = OTHER; note = uridine-3'-phosphate
  modified_base 10: mod_base = OTHER; note = guanosine-3'-phosphate
  modified_base 11: mod_base = OTHER; note = adenosine-3'-phosphate
  modified_base 12: mod_base = OTHER; note = uridine-3'-phosphate
  modified_base 13: mod_base = OTHER; note = adenosine-3'-phosphate
  modified_base 14: mod_base = OTHER; note = uridine-3'-phosphate
  modified_base 15: mod_base = OTHER; note = adenosine-3'-phosphate
  modified_base 16: mod_base = OTHER; note = adenosine-3'-phosphate
  modified_base 17: mod_base = OTHER; note = adenosine-3'-phosphate
  modified_base 18: mod_base = OTHER; note = cytidine-3'-phosphate
  modified_base 19: mod_base = OTHER; note = guanosine-3'-phosphate
  misc_feature 1..19: note = RNA
  misc_feature 20..21: note = DNA
tccaaatgtgatataaacgtt

SEQ ID NO: 2389 - DNA, 21 bp, synthetic construct
  source 1..21: mol_type = other DNA
  modified_base 1: mod_base = OTHER; note = uridine-3'-phosphate
  modified_base 2: mod_base = OTHER; note = uridine-3'-phosphate
  modified_base 3: mod_base = OTHER; note = cytidine-3'-phosphate
  modified_base 4: mod_base = OTHER; note = uridine-3'-phosphate
  modified_base 5: mod_base = OTHER; note = cytidine-3'-phosphate
  modified_base 6: mod_base = OTHER; note = uridine-3'-phosphate
  modified_base 7: mod_base = OTHER; note = uridine-3'-phosphate
  modified_base 8: mod_base = OTHER; note = adenosine-3'-phosphate
  modified_base 9: mod_base = OTHER; note = uridine-3'-phosphate
  modified_base 10: mod_base = OTHER; note = uridine-3'-phosphate
  modified_base 11: mod_base = OTHER; note = cytidine-3'-phosphate
  modified_base 12: mod_base = OTHER; note = cytidine-3'-phosphate
  modified_base 13: mod_base = OTHER; note = adenosine-3'-phosphate
  modified_base 14: mod_base = OTHER; note = adenosine-3'-phosphate
  modified_base 15: mod_base = OTHER; note = adenosine-3'-phosphate
  modified_base 16: mod_base = OTHER; note = uridine-3'-phosphate
  modified_base 17: mod_base = OTHER; note = guanosine-3'-phosphate
  modified_base 18: mod_base = OTHER; note = uridine-3'-phosphate
  modified_base 19: mod_base = OTHER; note = guanosine-3'-phosphate
  misc_feature 1..19: note = RNA
  misc_feature 20..21: note = DNA
ttctcttattccaaatgtgtt

SEQ ID NO: 2390 - DNA, 21 bp, synthetic construct
  source 1..21: mol_type = other DNA
  modified_base 1: mod_base = OTHER; note = uridine-3'-phosphate
  modified_base 2: mod_base = OTHER; note = uridine-3'-phosphate
  modified_base 3: mod_base = OTHER; note = uridine-3'-phosphate
  modified_base 4: mod_base = OTHER; note = uridine-3'-phosphate
  modified_base 5: mod_base = OTHER; note = adenosine-3'-phosphate
  modified_base 6: mod_base = OTHER; note = adenosine-3'-phosphate
  modified_base 7: mod_base = OTHER; note = guanosine-3'-phosphate
  modified_base 8: mod_base = OTHER; note = uridine-3'-phosphate
  modified_base 9: mod_base = OTHER; note = cytidine-3'-phosphate
  modified_base 10: mod_base = OTHER; note = uridine-3'-phosphate
  modified_base 11: mod_base = OTHER; note = uridine-3'-phosphate
  modified_base 12: mod_base = OTHER; note = cytidine-3'-phosphate
  modified_base 13: mod_base = OTHER; note = uridine-3'-phosphate
  modified_base 14: mod_base = OTHER; note = cytidine-3'-phosphate
  modified_base 15: mod_base = OTHER; note = uridine-3'-phosphate
  modified_base 16: mod_base = OTHER; note = uridine-3'-phosphate
  modified_base 17: mod_base = OTHER; note = adenosine-3'-phosphate
  modified_base 18: mod_base = OTHER; note = uridine-3'-phosphate
  modified_base 19: mod_base = OTHER; note = uridine-3'-phosphate
  misc_feature 1..19: note = RNA
  misc_feature 20..21: note = DNA
ttttaagtcttctcttatttt

SEQ ID NO: 2391 - DNA, 21 bp, synthetic construct
  source 1..21: mol_type = other DNA
  modified_base 1: mod_base = OTHER; note = uridine-3'-phosphate
  modified_base 2: mod_base = OTHER; note = uridine-3'-phosphate
  modified_base 3: mod_base = OTHER; note = uridine-3'-phosphate
  modified_base 4: mod_base = OTHER; note = uridine-3'-phosphate
  modified_base 5: mod_base = OTHER; note = uridine-3'-phosphate
  modified_base 6: mod_base = OTHER; note = guanosine-3'-phosphate
  modified_base 7: mod_base = OTHER; note = adenosine-3'-phosphate
  modified_base 8: mod_base = OTHER; note = uridine-3'-phosphate
  modified_base 9: mod_base = OTHER; note = cytidine-3'-phosphate
  modified_base 10: mod_base = OTHER; note = adenosine-3'-phosphate
  modified_base 11: mod_base = OTHER; note = uridine-3'-phosphate
  modified_base 12: mod_base = OTHER; note = cytidine-3'-phosphate
  modified_base 13: mod_base = OTHER; note = uridine-3'-phosphate
  modified_base 14: mod_base = OTHER; note = uridine-3'-phosphate
  modified_base 15: mod_base = OTHER; note = uridine-3'-phosphate
  modified_base 16: mod_base = OTHER; note = uridine-3'-phosphate
  modified_base 17: mod_base = OTHER; note = adenosine-3'-phosphate
  modified_base 18: mod_base = OTHER; note = adenosine-3'-phosphate
  modified_base 19: mod_base = OTHER; note = guanosine-3'-phosphate
  misc_feature 1..19: note = RNA
  misc_feature 20..21: note = DNA
tttttgatcatcttttaagtt

SEQ ID NO: 2392 - DNA, 21 bp, synthetic construct
  source 1..21: mol_type = other DNA
  modified_base 1: mod_base = OTHER; note = uridine-3'-phosphate
  modified_base 2: mod_base = OTHER; note = cytidine-3'-phosphate
  modified_base 3: mod_base = OTHER; note = adenosine-3'-phosphate
  modified_base 4: mod_base = OTHER; note = uridine-3'-phosphate
  modified_base 5: mod_base = OTHER; note = uridine-3'-phosphate
  modified_base 6: mod_base = OTHER; note = uridine-3'-phosphate
  modified_base 7: mod_base = OTHER; note = cytidine-3'-phosphate
  modified_base 8: mod_base = OTHER; note = uridine-3'-phosphate
  modified_base 9: mod_base = OTHER; note = uridine-3'-phosphate
  modified_base 10: mod_base = OTHER; note = uridine-3'-phosphate
  modified_base 11: mod_base = OTHER; note = uridine-3'-phosphate
  modified_base 12: mod_base = OTHER; note = uridine-3'-phosphate
  modified_base 13: mod_base = OTHER; note = guanosine-3'-phosphate
  modified_base 14: mod_base = OTHER; note = adenosine-3'-phosphate
  modified_base 15: mod_base = OTHER; note = uridine-3'-phosphate
  modified_base 16: mod_base = OTHER; note = cytidine-3'-phosphate
  modified_base 17: mod_base = OTHER; note = adenosine-3'-phosphate
  modified_base 18: mod_base = OTHER; note = uridine-3'-phosphate
  modified_base 19: mod_base = OTHER; note = cytidine-3'-phosphate
  misc_feature 1..19: note = RNA
  misc_feature 20..21: note = DNA
tcatttctttttgatcatctt

SEQ ID NO: 2393 - DNA, 21 bp, synthetic construct
  source 1..21: mol_type = other DNA
  modified_base 1: mod_base = OTHER; note = adenosine-3'-phosphate
  modified_base 2: mod_base = OTHER; note = uridine-3'-phosphate
  modified_base 3: mod_base = OTHER; note = uridine-3'-phosphate
  modified_base 4: mod_base = OTHER; note = guanosine-3'-phosphate
  modified_base 5: mod_base = OTHER; note = cytidine-3'-phosphate
  modified_base 6: mod_base = OTHER; note = uridine-3'-phosphate
  modified_base 7: mod_base = OTHER; note = guanosine-3'-phosphate
  modified_base 8: mod_base = OTHER; note = uridine-3'-phosphate
  modified_base 9: mod_base = OTHER; note = uridine-3'-phosphate
  modified_base 10: mod_base = OTHER; note = uridine-3'-phosphate
  modified_base 11: mod_base = OTHER; note = guanosine-3'-phosphate
  modified_base 12: mod_base = OTHER; note = cytidine-3'-phosphate
  modified_base 13: mod_base = OTHER; note = adenosine-3'-phosphate
  modified_base 14: mod_base = OTHER; note = uridine-3'-phosphate
  modified_base 15: mod_base = OTHER; note = cytidine-3'-phosphate
  modified_base 16: mod_base = OTHER; note = adenosine-3'-phosphate
  modified_base 17: mod_base = OTHER; note = uridine-3'-phosphate
  modified_base 18: mod_base = OTHER; note = uridine-3'-phosphate
  modified_base 19: mod_base = OTHER; note = uridine-3'-phosphate
  misc_feature 1..19: note = RNA
  misc_feature 20..21: note = DNA
attgctgtttgcatcattttt

SEQ ID NO: 2394 - DNA, 21 bp, synthetic construct
  source 1..21: mol_type = other DNA
  modified_base 1: mod_base = OTHER; note = uridine-3'-phosphate
  modified_base 2: mod_base = OTHER; note = uridine-3'-phosphate
  modified_base 3: mod_base = OTHER; note = guanosine-3'-phosphate
  modified_base 4: mod_base = OTHER; note = uridine-3'-phosphate
  modified_base 5: mod_base = OTHER; note = guanosine-3'-phosphate
  modified_base 6: mod_base = OTHER; note = uridine-3'-phosphate
  modified_base 7: mod_base = OTHER; note = uridine-3'-phosphate
  modified_base 8: mod_base = OTHER; note = uridine-3'-phosphate
  modified_base 9: mod_base = OTHER; note = uridine-3'-phosphate
  modified_base 10: mod_base = OTHER; note = guanosine-3'-phosphate
  modified_base 11: mod_base = OTHER; note = cytidine-3'-phosphate
  modified_base 12: mod_base = OTHER; note = adenosine-3'-phosphate
  modified_base 13: mod_base = OTHER; note = uridine-3'-phosphate
  modified_base 14: mod_base = OTHER; note = uridine-3'-phosphate
  modified_base 15: mod_base = OTHER; note = guanosine-3'-phosphate
  modified_base 16: mod_base = OTHER; note = cytidine-3'-phosphate
  modified_base 17: mod_base = OTHER; note = uridine-3'-phosphate
  modified_base 18: mod_base = OTHER; note = guanosine-3'-phosphate
  modified_base 19: mod_base = OTHER; note = uridine-3'-phosphate
  misc_feature 1..19: note = RNA
  misc_feature 20..21: note = DNA
ttgtgttttgcattgctgttt

SEQ ID NO: 2395 - DNA, 21 bp, synthetic construct
  source 1..21: mol_type = other DNA
  modified_base 1: mod_base = OTHER; note = uridine-3'-phosphate
  modified_base 2: mod_base = OTHER; note = uridine-3'-phosphate
  modified_base 3: mod_base = OTHER; note = uridine-3'-phosphate
  modified_base 4: mod_base = OTHER; note = adenosine-3'-phosphate
  modified_base 5: mod_base = OTHER; note = uridine-3'-phosphate
  modified_base 6: mod_base = OTHER; note = cytidine-3'-phosphate
  modified_base 7: mod_base = OTHER; note = adenosine-3'-phosphate
  modified_base 8: mod_base = OTHER; note = adenosine-3'-phosphate
  modified_base 9: mod_base = OTHER; note = cytidine-3'-phosphate
  modified_base 10: mod_base = OTHER; note = adenosine-3'-phosphate
  modified_base 11: mod_base = OTHER; note = uridine-3'-phosphate
  modified_base 12: mod_base = OTHER; note = uridine-3'-phosphate
  modified_base 13: mod_base = OTHER; note = guanosine-3'-phosphate
  modified_base 14: mod_base = OTHER; note = uridine-3'-phosphate
  modified_base 15: mod_base = OTHER; note = guanosine-3'-phosphate
  modified_base 16: mod_base = OTHER; note = uridine-3'-phosphate
  modified_base 17: mod_base = OTHER; note = uridine-3'-phosphate
  modified_base 18: mod_base = OTHER; note = uridine-3'-phosphate
  modified_base 19: mod_base = OTHER; note = uridine-3'-phosphate
  misc_feature 1..19: note = RNA
  misc_feature 20..21: note = DNA
tttatcaacattgtgtttttt

SEQ ID NO: 2396 - DNA, 21 bp, synthetic construct
  source 1..21: mol_type = other DNA
  modified_base 1: mod_base = OTHER; note = adenosine-3'-phosphate
  modified_base 2: mod_base = OTHER; note = uridine-3'-phosphate
  modified_base 3: mod_base = OTHER; note = uridine-3'-phosphate
  modified_base 4: mod_base = OTHER; note = cytidine-3'-phosphate
  modified_base 5: mod_base = OTHER; note = cytidine-3'-phosphate
  modified_base 6: mod_base = OTHER; note = adenosine-3'-phosphate
  modified_base 7: mod_base = OTHER; note = uridine-3'-phosphate
  modified_base 8: mod_base = OTHER; note = uridine-3'-phosphate
  modified_base 9: mod_base = OTHER; note = uridine-3'-phosphate
  modified_base 10: mod_base = OTHER; note = adenosine-3'-phosphate
  modified_base 11: mod_base = OTHER; note = uridine-3'-phosphate
  modified_base 12: mod_base = OTHER; note = cytidine-3'-phosphate
  modified_base 13: mod_base = OTHER; note = adenosine-3'-phosphate
  modified_base 14: mod_base = OTHER; note = adenosine-3'-phosphate
  modified_base 15: mod_base = OTHER; note = cytidine-3'-phosphate
  modified_base 16: mod_base = OTHER; note = adenosine-3'-phosphate
  modified_base 17: mod_base = OTHER; note = uridine-3'-phosphate
  modified_base 18: mod_base = OTHER; note = uridine-3'-phosphate
  modified_base 19: mod_base = OTHER; note = guanosine-3'-phosphate
  misc_feature 1..19: note = RNA
  misc_feature 20..21: note = DNA
attccatttatcaacattgtt

SEQ ID NO: 2397 - DNA, 21 bp, synthetic construct
  source 1..21: mol_type = other DNA
  modified_base 1: mod_base = OTHER; note = adenosine-3'-phosphate
  modified_base 2: mod_base = OTHER; note = uridine-3'-phosphate
  modified_base 3: mod_base = OTHER; note = guanosine-3'-phosphate
  modified_base 4: mod_base = OTHER; note = uridine-3'-phosphate
  modified_base 5: mod_base = OTHER; note = guanosine-3'-phosphate
  modified_base 6: mod_base = OTHER; note = adenosine-3'-phosphate
  modified_base 7: mod_base = OTHER; note = cytidine-3'-phosphate
  modified_base 8: mod_base = OTHER; note = uridine-3'-phosphate
  modified_base 9: mod_base = OTHER; note = uridine-3'-phosphate
  modified_base 10: mod_base = OTHER; note = guanosine-3'-phosphate
  modified_base 11: mod_base = OTHER; note = adenosine-3'-phosphate
  modified_base 12: mod_base = OTHER; note = guanosine-3'-phosphate
  modified_base 13: mod_base = OTHER; note = cytidine-3'-phosphate
  modified_base 14: mod_base = OTHER; note = adenosine-3'-phosphate
  modified_base 15: mod_base = OTHER; note = adenosine-3'-phosphate
  modified_base 16: mod_base = OTHER; note = uridine-3'-phosphate
  modified_base 17: mod_base = OTHER; note = uridine-3'-phosphate
  modified_base 18: mod_base = OTHER; note = cytidine-3'-phosphate
  modified_base 19: mod_base = OTHER; note = cytidine-3'-phosphate
  misc_feature 1..19: note = RNA
  misc_feature 20..21: note = DNA
atgtgacttgagcaattcctt

SEQ ID NO: 2398 - DNA, 21 bp, synthetic construct
  source 1..21: mol_type = other DNA
  modified_base 1: mod_base = OTHER; note = adenosine-3'-phosphate
  modified_base 2: mod_base = OTHER; note = adenosine-3'-phosphate
  modified_base 3: mod_base = OTHER; note = uridine-3'-phosphate
  modified_base 4: mod_base = OTHER; note = cytidine-3'-phosphate
  modified_base 5: mod_base = OTHER; note = adenosine-3'-phosphate
  modified_base 6: mod_base = OTHER; note = adenosine-3'-phosphate
  modified_base 7: mod_base = OTHER; note = adenosine-3'-phosphate
  modified_base 8: mod_base = OTHER; note = uridine-3'-phosphate
  modified_base 9: mod_base = OTHER; note = guanosine-3'-phosphate
  modified_base 10: mod_base = OTHER; note = uridine-3'-phosphate
  modified_base 11: mod_base = OTHER; note = guanosine-3'-phosphate
  modified_base 12: mod_base = OTHER; note = adenosine-3'-phosphate
  modified_base 13: mod_base = OTHER; note = cytidine-3'-phosphate
  modified_base 14: mod_base = OTHER; note = uridine-3'-phosphate
  modified_base 15: mod_base = OTHER; note = uridine-3'-phosphate
  modified_base 16: mod_base = OTHER; note = guanosine-3'-phosphate
  modified_base 17: mod_base = OTHER; note = adenosine-3'-phosphate
  modified_base 18: mod_base = OTHER; note = guanosine-3'-phosphate
  modified_base 19: mod_base = OTHER; note = cytidine-3'-phosphate
  misc_feature 1..19: note = RNA
  misc_feature 20..21: note = DNA
aatcaaatgtgacttgagctt

SEQ ID NO: 2399 - DNA, 21 bp, synthetic construct
  source 1..21: mol_type = other DNA
  modified_base 1: mod_base = OTHER; note = uridine-3'-phosphate
  modified_base 2: mod_base = OTHER; note = guanosine-3'-phosphate
  modified_base 3: mod_base = OTHER; note = cytidine-3'-phosphate
  modified_base 4: mod_base = OTHER; note = uridine-3'-phosphate
  modified_base 5: mod_base = OTHER; note = guanosine-3'-phosphate
  modified_base 6: mod_base = OTHER; note = uridine-3'-phosphate
  modified_base 7: mod_base = OTHER; note = uridine-3'-phosphate
  modified_base 8: mod_base = OTHER; note = uridine-3'-phosphate
  modified_base 9: mod_base = OTHER; note = cytidine-3'-phosphate
  modified_base 10: mod_base = OTHER; note = adenosine-3'-phosphate
  modified_base 11: mod_base = OTHER; note = guanosine-3'-phosphate
  modified_base 12: mod_base = OTHER; note = adenosine-3'-phosphate
  modified_base 13: mod_base = OTHER; note = adenosine-3'-phosphate
  modified_base 14: mod_base = OTHER; note = uridine-3'-phosphate
  modified_base 15: mod_base = OTHER; note = cytidine-3'-phosphate
  modified_base 16: mod_base = OTHER; note = adenosine-3'-phosphate
  modified_base 17: mod_base = OTHER; note = adenosine-3'-phosphate
  modified_base 18: mod_base = OTHER; note = adenosine-3'-phosphate
  modified_base 19: mod_base = OTHER; note = uridine-3'-phosphate
  misc_feature 1..19: note = RNA
  misc_feature 20..21: note = DNA
tgctgtttcagaatcaaattt

SEQ ID NO: 2400 - DNA, 21 bp, synthetic construct
  source 1..21: mol_type = other DNA
  modified_base 1: mod_base = OTHER; note = uridine-3'-phosphate
  modified_base 2: mod_base = OTHER; note = uridine-3'-phosphate
  modified_base 3: mod_base = OTHER; note = cytidine-3'-phosphate
  modified_base 4: mod_base = OTHER; note = uridine-3'-phosphate
  modified_base 5: mod_base = OTHER; note = uridine-3'-phosphate
  modified_base 6: mod_base = OTHER; note = uridine-3'-phosphate
  modified_base 7: mod_base = OTHER; note = guanosine-3'-phosphate
  modified_base 8: mod_base = OTHER; note = adenosine-3'-phosphate
  modified_base 9: mod_base = OTHER; note = cytidine-3'-phosphate
  modified_base 10: mod_base = OTHER; note = uridine-3'-phosphate
  modified_base 11: mod_base = OTHER; note = guanosine-3'-phosphate
  modified_base 12: mod_base = OTHER; note = cytidine-3'-phosphate
  modified_base 13: mod_base = OTHER; note = uridine-3'-phosphate
  modified_base 14: mod_base = OTHER; note = guanosine-3'-phosphate
  modified_base 15: mod_base = OTHER; note = uridine-3'-phosphate
  modified_base 16: mod_base = OTHER; note = uridine-3'-phosphate
  modified_base 17: mod_base = OTHER; note = uridine-3'-phosphate
  modified_base 18: mod_base = OTHER; note = cytidine-3'-phosphate
  modified_base 19: mod_base = OTHER; note = adenosine-3'-phosphate
  misc_feature 1..19: note = RNA
  misc_feature 20..21: note = DNA
ttctttgactgctgtttcatt

SEQ ID NO: 2401 - DNA, 21 bp, synthetic construct
  source 1..21: mol_type = other DNA
  modified_base 1: mod_base = OTHER; note = guanosine-3'-phosphate
  modified_base 2: mod_base = OTHER; note = uridine-3'-phosphate
  modified_base 3: mod_base = OTHER; note = adenosine-3'-phosphate
  modified_base 4: mod_base = OTHER; note = guanosine-3'-phosphate
  modified_base 5: mod_base = OTHER; note = uridine-3'-phosphate
  modified_base 6: mod_base = OTHER; note = adenosine-3'-phosphate
  modified_base 7: mod_base = OTHER; note = uridine-3'-phosphate
  modified_base 8: mod_base = OTHER; note = guanosine-3'-phosphate
  modified_base 9: mod_base = OTHER; note = adenosine-3'-phosphate
  modified_base 10: mod_base = OTHER; note = cytidine-3'-phosphate
  modified_base 11: mod_base = OTHER; note = adenosine-3'-phosphate
  modified_base 12: mod_base = OTHER; note = guanosine-3'-phosphate
  modified_base 13: mod_base = OTHER; note = uridine-3'-phosphate
  modified_base 14: mod_base = OTHER; note = uridine-3'-phosphate
  modified_base 15: mod_base = OTHER; note = cytidine-3'-phosphate
  modified_base 16: mod_base = OTHER; note = uridine-3'-phosphate
  modified_base 17: mod_base = OTHER; note = uridine-3'-phosphate
  modified_base 18: mod_base = OTHER; note = uridine-3'-phosphate
  modified_base 19: mod_base = OTHER; note = guanosine-3'-phosphate
  misc_feature 1..19: note = RNA
  misc_feature 20..21: note = DNA
gtagtatgacagttctttgtt

SEQ ID NO: 2402 - DNA, 21 bp, synthetic construct
  source 1..21: mol_type = other DNA
  modified_base 1: mod_base = OTHER; note = uridine-3'-phosphate
  modified_base 2: mod_base = OTHER; note = cytidine-3'-phosphate
  modified_base 3: mod_base = OTHER; note = uridine-3'-phosphate
  modified_base 4: mod_base = OTHER; note = uridine-3'-phosphate
  modified_base 5: mod_base = OTHER; note = cytidine-3'-phosphate
  modified_base 6: mod_base = OTHER; note = uridine-3'-phosphate
  modified_base 7: mod_base = OTHER; note = adenosine-3'-phosphate
  modified_base 8: mod_base = OTHER; note = adenosine-3'-phosphate
  modified_base 9: mod_base = OTHER; note = adenosine-3'-phosphate
  modified_base 10: mod_base = OTHER; note = cytidine-3'-phosphate
  modified_base 11: mod_base = OTHER; note = uridine-3'-phosphate
  modified_base 12: mod_base = OTHER; note = guanosine-3'-phosphate
  modified_base 13: mod_base = OTHER; note = uridine-3'-phosphate
  modified_base 14: mod_base = OTHER; note = adenosine-3'-phosphate
  modified_base 15: mod_base = OTHER; note = guanosine-3'-phosphate
  modified_base 16: mod_base = OTHER; note = uridine-3'-phosphate
  modified_base 17: mod_base = OTHER; note = adenosine-3'-phosphate
  modified_base 18: mod_base = OTHER; note = uridine-3'-phosphate
  modified_base 19: mod_base = OTHER; note = guanosine-3'-phosphate
  misc_feature 1..19: note = RNA
  misc_feature 20..21: note = DNA
tcttctaaactgtagtatgtt

SEQ ID NO: 2403 - DNA, 21 bp, synthetic construct
  source 1..21: mol_type = other DNA
  modified_base 1: mod_base = OTHER; note = guanosine-3'-phosphate
  modified_base 2: mod_base = OTHER; note = uridine-3'-phosphate
  modified_base 3: mod_base = OTHER; note = uridine-3'-phosphate
  modified_base 4: mod_base = OTHER; note = uridine-3'-phosphate
  modified_base 5: mod_base = OTHER; note = adenosine-3'-phosphate
  modified_base 6: mod_base = OTHER; note = adenosine-3'-phosphate
  modified_base 7: mod_base = OTHER; note = adenosine-3'-phosphate
  modified_base 8: mod_base = OTHER; note = uridine-3'-phosphate
  modified_base 9: mod_base = OTHER; note = cytidine-3'-phosphate
  modified_base 10: mod_base = OTHER; note = uridine-3'-phosphate
  modified_base 11: mod_base = OTHER; note = uridine-3'-phosphate
  modified_base 12: mod_base = OTHER; note = cytidine-3'-phosphate
  modified_base 13: mod_base = OTHER; note = uridine-3'-phosphate
  modified_base 14: mod_base = OTHER; note = adenosine-3'-phosphate
  modified_base 15: mod_base = OTHER; note = adenosine-3'-phosphate
  modified_base 16: mod_base = OTHER; note = adenosine-3'-phosphate
  modified_base 17: mod_base = OTHER; note = cytidine-3'-phosphate
  modified_base 18: mod_base = OTHER; note = uridine-3'-phosphate
  modified_base 19: mod_base = OTHER; note = guanosine-3'-phosphate
  misc_feature 1..19: note = RNA
  misc_feature 20..21: note = DNA
gtttaaatcttctaaactgtt

SEQ ID NO: 2404 - DNA, 21 bp, synthetic construct
  source 1..21: mol_type = other DNA
  modified_base 1: mod_base = OTHER; note = uridine-3'-phosphate
  modified_base 2: mod_base = OTHER; note = adenosine-3'-phosphate
  modified_base 3: mod_base = OTHER; note = adenosine-3'-phosphate
  modified_base 4: mod_base = OTHER; note = adenosine-3'-phosphate
  modified_base 5: mod_base = OTHER; note = guanosine-3'-phosphate
  modified_base 6: mod_base = OTHER; note = guanosine-3'-phosphate
  modified_base 7: mod_base = OTHER; note = uridine-3'-phosphate
  modified_base 8: mod_base = OTHER; note = adenosine-3'-phosphate
  modified_base 9: mod_base = OTHER; note = cytidine-3'-phosphate
  modified_base 10: mod_base = OTHER; note = uridine-3'-phosphate
  modified_base 11: mod_base = OTHER; note = uridine-3'-phosphate
  modified_base 12: mod_base = OTHER; note = guanosine-3'-phosphate
  modified_base 13: mod_base = OTHER; note = uridine-3'-phosphate
  modified_base 14: mod_base = OTHER; note = uridine-3'-phosphate
  modified_base 15: mod_base = OTHER; note = guanosine-3'-phosphate
  modified_base 16: mod_base = OTHER; note = uridine-3'-phosphate
  modified_base 17: mod_base = OTHER; note = uridine-3'-phosphate
  modified_base 18: mod_base = OTHER; note = uridine-3'-phosphate
  modified_base 19: mod_base = OTHER; note = adenosine-3'-phosphate
  misc_feature 1..19: note = RNA
  misc_feature 20..21: note = DNA
taaaggtacttgttgtttatt

SEQ ID NO: 2405 - DNA, 21 bp, synthetic construct
  source 1..21: mol_type = other DNA
  modified_base 1: mod_base = OTHER; note = adenosine-3'-phosphate
  modified_base 2: mod_base = OTHER; note = guanosine-3'-phosphate
  modified_base 3: mod_base = OTHER; note = cytidine-3'-phosphate
  modified_base 4: mod_base = OTHER; note = adenosine-3'-phosphate
  modified_base 5: mod_base = OTHER; note = adenosine-3'-phosphate
  modified_base 6: mod_base = OTHER; note = uridine-3'-phosphate
  modified_base 7: mod_base = OTHER; note = adenosine-3'-phosphate
  modified_base 8: mod_base = OTHER; note = uridine-3'-phosphate
  modified_base 9: mod_base = OTHER; note = adenosine-3'-phosphate
  modified_base 10: mod_base = OTHER; note = adenosine-3'-phosphate
  modified_base 11: mod_base = OTHER; note = adenosine-3'-phosphate
  modified_base 12: mod_base = OTHER; note = guanosine-3'-phosphate
  modified_base 13: mod_base = OTHER; note = guanosine-3'-phosphate
  modified_base 14: mod_base = OTHER; note = uridine-3'-phosphate
  modified_base 15: mod_base = OTHER; note = adenosine-3'-phosphate
  modified_base 16: mod_base = OTHER; note = cytidine-3'-phosphate
  modified_base 17: mod_base = OTHER; note = uridine-3'-phosphate
  modified_base 18: mod_base = OTHER; note = uridine-3'-phosphate
  modified_base 19: mod_base = OTHER; note = guanosine-3'-phosphate
  misc_feature 1..19: note = RNA
  misc_feature 20..21: note = DNA
agcaatataaaggtacttgtt

SEQ ID NO: 2406 - DNA, 21 bp, synthetic construct
  source 1..21: mol_type = other DNA
  modified_base 1: mod_base = OTHER; note = uridine-3'-phosphate
  modified_base 2: mod_base = OTHER; note = adenosine-3'-phosphate
  modified_base 3: mod_base = OTHER; note = uridine-3'-phosphate
  modified_base 4: mod_base = OTHER; note = guanosine-3'-phosphate
  modified_base 5: mod_base = OTHER; note = adenosine-3'-phosphate
  modified_base 6: mod_base = OTHER; note = cytidine-3'-phosphate
  modified_base 7: mod_base = OTHER; note = uridine-3'-phosphate
  modified_base 8: mod_base = OTHER; note = guanosine-3'-phosphate
  modified_base 9: mod_base = OTHER; note = uridine-3'-phosphate
  modified_base 10: mod_base = OTHER; note = uridine-3'-phosphate
  modified_base 11: mod_base = OTHER; note = adenosine-3'-phosphate
  modified_base 12: mod_base = OTHER; note = cytidine-3'-phosphate
  modified_base 13: mod_base = OTHER; note = adenosine-3'-phosphate
  modified_base 14: mod_base = OTHER; note = guanosine-3'-phosphate
  modified_base 15: mod_base = OTHER; note = cytidine-3'-phosphate
  modified_base 16: mod_base = OTHER; note = adenosine-3'-phosphate
  modified_base 17: mod_base = OTHER; note = adenosine-3'-phosphate
  modified_base 18: mod_base = OTHER; note = uridine-3'-phosphate
  modified_base 19: mod_base = OTHER; note = adenosine-3'-phosphate
  misc_feature 1..19: note = RNA
  misc_feature 20..21: note = DNA
tatgactgttacagcaatatt

SEQ ID NO: 2407 - DNA, 21 bp, synthetic construct
  source 1..21: mol_type = other DNA
  modified_base 1: mod_base = OTHER; note = uridine-3'-phosphate
  modified_base 2: mod_base = OTHER; note = guanosine-3'-phosphate
  modified_base 3: mod_base = OTHER; note = uridine-3'-phosphate
  modified_base 4: mod_base = OTHER; note = adenosine-3'-phosphate
  modified_base 5: mod_base = OTHER; note = guanosine-3'-phosphate
  modified_base 6: mod_base = OTHER; note = adenosine-3'-phosphate
  modified_base 7: mod_base = OTHER; note = cytidine-3'-phosphate
  modified_base 8: mod_base = OTHER; note = uridine-3'-phosphate
  modified_base 9: mod_base = OTHER; note = cytidine-3'-phosphate
  modified_base 10: mod_base = OTHER; note = uridine-3'-phosphate
  modified_base 11: mod_base = OTHER; note = adenosine-3'-phosphate
  modified_base 12: mod_base = OTHER; note = uridine-3'-phosphate
  modified_base 13: mod_base = OTHER; note = guanosine-3'-phosphate
  modified_base 14: mod_base = OTHER; note = adenosine-3'-phosphate
  modified_base 15: mod_base = OTHER; note = cytidine-3'-phosphate
  modified_base 16: mod_base = OTHER; note = uridine-3'-phosphate
  modified_base 17: mod_base = OTHER; note = guanosine-3'-phosphate
  modified_base 18: mod_base = OTHER; note = uridine-3'-phosphate
  modified_base 19: mod_base = OTHER; note = uridine-3'-phosphate
  misc_feature 1..19: note = RNA
  misc_feature 20..21: note = DNA
tgtagactctatgactgtttt

SEQ ID NO: 2408 - DNA, 21 bp, synthetic construct
  source 1..21: mol_type = other DNA
  modified_base 1: mod_base = OTHER; note = adenosine-3'-phosphate
  modified_base 2: mod_base = OTHER; note = adenosine-3'-phosphate
  modified_base 3: mod_base = OTHER; note = adenosine-3'-phosphate
  modified_base 4: mod_base = OTHER; note = uridine-3'-phosphate
  modified_base 5: mod_base = OTHER; note = cytidine-3'-phosphate
  modified_base 6: mod_base = OTHER; note = cytidine-3'-phosphate
  modified_base 7: mod_base = OTHER; note = adenosine-3'-phosphate
  modified_base 8: mod_base = OTHER; note = cytidine-3'-phosphate
  modified_base 9: mod_base = OTHER; note = cytidine-3'-phosphate
  modified_base 10: mod_base = OTHER; note = uridine-3'-phosphate
  modified_base 11: mod_base = OTHER; note = guanosine-3'-phosphate
  modified_base 12: mod_base = OTHER; note = uridine-3'-phosphate
  modified_base 13: mod_base = OTHER; note = adenosine-3'-phosphate
  modified_base 14: mod_base = OTHER; note = guanosine-3'-phosphate
  modified_base 15: mod_base = OTHER; note = adenosine-3'-phosphate
  modified_base 16: mod_base = OTHER; note = cytidine-3'-phosphate
  modified_base 17: mod_base = OTHER; note = uridine-3'-phosphate
  modified_base 18: mod_base = OTHER; note = cytidine-3'-phosphate
  modified_base 19: mod_base = OTHER; note = uridine-3'-phosphate
  misc_feature 1..19: note = RNA
  misc_feature 20..21: note = DNA
aaatccacctgtagactcttt

SEQ ID NO: 2409 - DNA, 21 bp, synthetic construct
  source 1..21: mol_type = other DNA
  modified_base 1: mod_base = OTHER; note = cytidine-3'-phosphate
  modified_base 2: mod_base = OTHER; note = uridine-3'-phosphate
  modified_base 3: mod_base = OTHER; note = guanosine-3'-phosphate
  modified_base 4: mod_base = OTHER; note = cytidine-3'-phosphate
  modified_base 5: mod_base = OTHER; note = cytidine-3'-phosphate
  modified_base 6: mod_base = OTHER; note = uridine-3'-phosphate
  modified_base 7: mod_base = OTHER; note = cytidine-3'-phosphate
  modified_base 8: mod_base = OTHER; note = uridine-3'-phosphate
  modified_base 9: mod_base = OTHER; note = uridine-3'-phosphate
  modified_base 10: mod_base = OTHER; note = cytidine-3'-phosphate
  modified_base 11: mod_base = OTHER; note = adenosine-3'-phosphate
  modified_base 12: mod_base = OTHER; note = guanosine-3'-phosphate
  modified_base 13: mod_base = OTHER; note = adenosine-3'-phosphate
  modified_base 14: mod_base = OTHER; note = adenosine-3'-phosphate
  modified_base 15: mod_base = OTHER; note = adenosine-3'-phosphate
  modified_base 16: mod_base = OTHER; note = adenosine-3'-phosphate
  modified_base 17: mod_base = OTHER; note = uridine-3'-phosphate
  modified_base 18: mod_base = OTHER; note = cytidine-3'-phosphate
  modified_base 19: mod_base = OTHER; note = cytidine-3'-phosphate
  misc_feature 1..19: note = RNA
  misc_feature 20..21: note = DNA
ctgcctcttcagaaaatcctt

SEQ ID NO: 2410 - DNA, 21 bp, synthetic construct
  source 1..21: mol_type = other DNA
  modified_base 1: mod_base = OTHER; note = cytidine-3'-phosphate
  modified_base 2: mod_base = OTHER; note = adenosine-3'-phosphate
  modified_base 3: mod_base = OTHER; note = guanosine-3'-phosphate
  modified_base 4: mod_base = OTHER; note = guanosine-3'-phosphate
  modified_base 5: mod_base = OTHER; note = uridine-3'-phosphate
  modified_base 6: mod_base = OTHER; note = adenosine-3'-phosphate
  modified_base 7: mod_base = OTHER; note = uridine-3'-phosphate
  modified_base 8: mod_base = OTHER; note = uridine-3'-phosphate
  modified_base 9: mod_base = OTHER; note = uridine-3'-phosphate
  modified_base 10: mod_base = OTHER; note = cytidine-3'-phosphate
  modified_base 11: mod_base = OTHER; note = uridine-3'-phosphate
  modified_base 12: mod_base = OTHER; note = guanosine-3'-phosphate
  modified_base 13: mod_base = OTHER; note = cytidine-3'-phosphate
  modified_base 14: mod_base = OTHER; note = cytidine-3'-phosphate
  modified_base 15: mod_base = OTHER; note = uridine-3'-phosphate
  modified_base 16: mod_base = OTHER; note = cytidine-3'-phosphate
  modified_base 17: mod_base = OTHER; note = uridine-3'-phosphate
  modified_base 18: mod_base = OTHER; note = uridine-3'-phosphate
  modified_base 19: mod_base = OTHER; note = cytidine-3'-phosphate
  misc_feature 1..19: note = RNA
  misc_feature 20..21: note = DNA
caggtatttctgcctcttctt

SEQ ID NO: 2411 - DNA, 21 bp, synthetic construct
  source 1..21: mol_type = other DNA
  modified_base 1: mod_base = OTHER; note = uridine-3'-phosphate
  modified_base 2: mod_base = OTHER; note = uridine-3'-phosphate
  modified_base 3: mod_base = OTHER; note = uridine-3'-phosphate
  modified_base 4: mod_base = OTHER; note = guanosine-3'-phosphate
  modified_base 5: mod_base = OTHER; note = adenosine-3'-phosphate
  modified_base 6: mod_base = OTHER; note = uridine-3'-phosphate
  modified_base 7: mod_base = OTHER; note = guanosine-3'-phosphate
  modified_base 8: mod_base = OTHER; note = cytidine-3'-phosphate
  modified_base 9: mod_base = OTHER; note = cytidine-3'-phosphate
  modified_base 10: mod_base = OTHER; note = adenosine-3'-phosphate
  modified_base 11: mod_base = OTHER; note = guanosine-3'-phosphate
  modified_base 12: mod_base = OTHER; note = guanosine-3'-phosphate
  modified_base 13: mod_base = OTHER; note = uridine-3'-phosphate
  modified_base 14: mod_base = OTHER; note = adenosine-3'-phosphate
  modified_base 15: mod_base = OTHER; note = uridine-3'-phosphate
  modified_base 16: mod_base = OTHER; note = uridine-3'-phosphate
  modified_base 17: mod_base = OTHER; note = uridine-3'-phosphate
  modified_base 18: mod_base = OTHER; note = cytidine-3'-phosphate
  modified_base 19: mod_base = OTHER; note = uridine-3'-phosphate
  misc_feature 1..19: note = RNA
  misc_feature 20..21: note = DNA
tttgatgccaggtatttcttt

SEQ ID NO: 2412 - DNA, 21 bp, synthetic construct
  source 1..21: mol_type = other DNA
  modified_base 1: mod_base = OTHER; note = guanosine-3'-phosphate
  modified_base 2: mod_base = OTHER; note = adenosine-3'-phosphate
  modified_base 3: mod_base = OTHER; note = guanosine-3'-phosphate
  modified_base 4: mod_base = OTHER; note = adenosine-3'-phosphate
  modified_base 5: mod_base = OTHER; note = guanosine-3'-phosphate
  modified_base 6: mod_base = OTHER; note = guanosine-3'-phosphate
  modified_base 7: mod_base = OTHER; note = adenosine-3'-phosphate
  modified_base 8: mod_base = OTHER; note = cytidine-3'-phosphate
  modified_base 9: mod_base = OTHER; note = adenosine-3'-phosphate
  modified_base 10: mod_base = OTHER; note = uridine-3'-phosphate
  modified_base 11: mod_base = OTHER; note = adenosine-3'-phosphate
  modified_base 12: mod_base = OTHER; note = uridine-3'-phosphate
  modified_base 13: mod_base = OTHER; note = uridine-3'-phosphate
  modified_base 14: mod_base = OTHER; note = uridine-3'-phosphate
  modified_base 15: mod_base = OTHER; note = guanosine-3'-phosphate
  modified_base 16: mod_base = OTHER; note = adenosine-3'-phosphate
  modified_base 17: mod_base = OTHER; note = uridine-3'-phosphate
  modified_base 18: mod_base = OTHER; note = guanosine-3'-phosphate
  modified_base 19: mod_base = OTHER; note = cytidine-3'-phosphate
  misc_feature 1..19: note = RNA
  misc_feature 20..21: note = DNA
gagaggacatatttgatgctt

SEQ ID NO: 2413 - DNA, 21 bp, synthetic construct
  source 1..21: mol_type = other DNA
  modified_base 1: mod_base = OTHER; note = uridine-3'-phosphate
  modified_base 2: mod_base = OTHER; note = uridine-3'-phosphate
  modified_base 3: mod_base = OTHER; note = uridine-3'-phosphate
  modified_base 4: mod_base = OTHER; note = guanosine-3'-phosphate
  modified_base 5: mod_base = OTHER; note = uridine-3'-phosphate
  modified_base 6: mod_base = OTHER; note = adenosine-3'-phosphate
  modified_base 7: mod_base = OTHER; note = guanosine-3'-phosphate
  modified_base 8: mod_base = OTHER; note = guanosine-3'-phosphate
  modified_base 9: mod_base = OTHER; note = guanosine-3'-phosphate
  modified_base 10: mod_base = OTHER; note = adenosine-3'-phosphate
  modified_base 11: mod_base = OTHER; note = guanosine-3'-phosphate
  modified_base 12: mod_base = OTHER; note = adenosine-3'-phosphate
  modified_base 13: mod_base = OTHER; note = guanosine-3'-phosphate
  modified_base 14: mod_base = OTHER; note = adenosine-3'-phosphate
  modified_base 15: mod_base = OTHER; note = guanosine-3'-phosphate
  modified_base 16: mod_base = OTHER; note = guanosine-3'-phosphate
  modified_base 17: mod_base = OTHER; note = adenosine-3'-phosphate
  modified_base 18: mod_base = OTHER; note = cytidine-3'-phosphate
  modified_base 19: mod_base = OTHER; note = adenosine-3'-phosphate
  misc_feature 1..19: note = RNA
  misc_feature 20..21: note = DNA
tttgtagggagagaggacatt

SEQ ID NO: 2414 - DNA, 21 bp, synthetic construct
  source 1..21: mol_type = other DNA
  modified_base 1: mod_base = OTHER; note = adenosine-3'-phosphate
  modified_base 2: mod_base = OTHER; note = guanosine-3'-phosphate
  modified_base 3: mod_base = OTHER; note = guanosine-3'-phosphate
  modified_base 4: mod_base = OTHER; note = adenosine-3'-phosphate
  modified_base 5: mod_base = OTHER; note = guanosine-3'-phosphate
  modified_base 6: mod_base = OTHER; note = uridine-3'-phosphate
  modified_base 7: mod_base = OTHER; note = adenosine-3'-phosphate
  modified_base 8: mod_base = OTHER; note = guanosine-3'-phosphate
  modified_base 9: mod_base = OTHER; note = cytidine-3'-phosphate
  modified_base 10: mod_base = OTHER; note = adenosine-3'-phosphate
  modified_base 11: mod_base = OTHER; note = adenosine-3'-phosphate
  modified_base 12: mod_base = OTHER; note = cytidine-3'-phosphate
  modified_base 13: mod_base = OTHER; note = cytidine-3'-phosphate
  modified_base 14: mod_base = OTHER; note = adenosine-3'-phosphate
  modified_base 15: mod_base = OTHER; note = adenosine-3'-phosphate
  modified_base 16: mod_base = OTHER; note = adenosine-3'-phosphate
  modified_base 17: mod_base = OTHER; note = uridine-3'-phosphate
  modified_base 18: mod_base = OTHER; note = uridine-3'-phosphate
  modified_base 19: mod_base = OTHER; note = cytidine-3'-phosphate
  misc_feature 1..19: note = RNA
  misc_feature 20..21: note = DNA
aggagtagcaaccaaattctt

SEQ ID NO: 2415 - DNA, 21 bp, synthetic construct
  source 1..21: mol_type = other DNA
  modified_base 1: mod_base = OTHER; note = uridine-3'-phosphate
  modified_base 2: mod_base = OTHER; note = cytidine-3'-phosphate
  modified_base 3: mod_base = OTHER; note = adenosine-3'-phosphate
  modified_base 4: mod_base = OTHER; note = guanosine-3'-phosphate
  modified_base 5: mod_base = OTHER; note = guanosine-3'-phosphate
  modified_base 6: mod_base = OTHER; note = adenosine-3'-phosphate
  modified_base 7: mod_base = OTHER; note = adenosine-3'-phosphate
  modified_base 8: mod_base = OTHER; note = adenosine-3'-phosphate
  modified_base 9: mod_base = OTHER; note = adenosine-3'-phosphate
  modified_base 10: mod_base = OTHER; note = guanosine-3'-phosphate
  modified_base 11: mod_base = OTHER; note = adenosine-3'-phosphate
  modified_base 12: mod_base = OTHER; note = guanosine-3'-phosphate
  modified_base 13: mod_base = OTHER; note = guanosine-3'-phosphate
  modified_base 14: mod_base = OTHER; note = adenosine-3'-phosphate
  modified_base 15: mod_base = OTHER; note = guanosine-3'-phosphate
  modified_base 16: mod_base = OTHER; note = uridine-3'-phosphate
  modified_base 17: mod_base = OTHER; note = adenosine-3'-phosphate
  modified_base 18: mod_base = OTHER; note = guanosine-3'-phosphate
  modified_base 19: mod_base = OTHER; note = cytidine-3'-phosphate
  misc_feature 1..19: note = RNA
  misc_feature 20..21: note = DNA
tcaggaaaagaggagtagctt

SEQ ID NO: 2416 - DNA, 21 bp, synthetic construct
  source 1..21: mol_type = other DNA
  modified_base 1: mod_base = OTHER; note = cytidine-3'-phosphate
  modified_base 2: mod_base = OTHER; note = cytidine-3'-phosphate
  modified_base 3: mod_base = OTHER; note = adenosine-3'-phosphate
  modified_base 4: mod_base = OTHER; note = guanosine-3'-phosphate
  modified_base 5: mod_base = OTHER; note = guanosine-3'-phosphate
  modified_base 6: mod_base = OTHER; note = cytidine-3'-phosphate
  modified_base 7: mod_base = OTHER; note = uridine-3'-phosphate
  modified_base 8: mod_base = OTHER; note = uridine-3'-phosphate
  modified_base 9: mod_base = OTHER; note = cytidine-3'-phosphate
  modified_base 10: mod_base = OTHER; note = adenosine-3'-phosphate
  modified_base 11: mod_base = OTHER; note = guanosine-3'-phosphate
  modified_base 12: mod_base = OTHER; note = guanosine-3'-phosphate
  modified_base 13: mod_base = OTHER; note = adenosine-3'-phosphate
  modified_base 14: mod_base = OTHER; note = adenosine-3'-phosphate
  modified_base 15: mod_base = OTHER; note = adenosine-3'-phosphate
  modified_base 16: mod_base = OTHER; note = adenosine-3'-phosphate
  modified_base 17: mod_base = OTHER; note = guanosine-3'-phosphate
  modified_base 18: mod_base = OTHER; note = adenosine-3'-phosphate
  modified_base 19: mod_base = OTHER; note = guanosine-3'-phosphate
  misc_feature 1..19: note = RNA
  misc_feature 20..21: note = DNA
ccaggcttcaggaaaagagtt

SEQ ID NO: 2417 - DNA, 21 bp, synthetic construct
  source 1..21: mol_type = other DNA
  modified_base 1: mod_base = OTHER; note = uridine-3'-phosphate
  modified_base 2: mod_base = OTHER; note = guanosine-3'-phosphate
  modified_base 3: mod_base = OTHER; note = guanosine-3'-phosphate
  modified_base 4: mod_base = OTHER; note = guanosine-3'-phosphate
  modified_base 5: mod_base = OTHER; note = adenosine-3'-phosphate
  modified_base 6: mod_base = OTHER; note = uridine-3'-phosphate
  modified_base 7: mod_base = OTHER; note = adenosine-3'-phosphate
  modified_base 8: mod_base = OTHER; note = uridine-3'-phosphate
  modified_base 9: mod_base = OTHER; note = guanosine-3'-phosphate
  modified_base 10: mod_base = OTHER; note = guanosine-3'-phosphate
  modified_base 11: mod_base = OTHER; note = adenosine-3'-phosphate
  modified_base 12: mod_base = OTHER; note = adenosine-3'-phosphate
  modified_base 13: mod_base = OTHER; note = uridine-3'-phosphate
  modified_base 14: mod_base = OTHER; note = cytidine-3'-phosphate
  modified_base 15: mod_base = OTHER; note = cytidine-3'-phosphate
  modified_base 16: mod_base = OTHER; note = cytidine-3'-phosphate
  modified_base 17: mod_base = OTHER; note = adenosine-3'-phosphate
  modified_base 18: mod_base = OTHER; note = guanosine-3'-phosphate
  modified_base 19: mod_base = OTHER; note = guanosine-3'-phosphate
  misc_feature 1..19: note = RNA
  misc_feature 20..21: note = DNA
tgggatatggaatcccaggtt

SEQ ID NO: 2418 - DNA, 21 bp, synthetic construct
  source 1..21: mol_type = other DNA
  modified_base 1: mod_base = OTHER; note = uridine-3'-phosphate
  modified_base 2: mod_base = OTHER; note = guanosine-3'-phosphate
  modified_base 3: mod_base = OTHER; note = cytidine-3'-phosphate
  modified_base 4: mod_base = OTHER; note = adenosine-3'-phosphate
  modified_base 5: mod_base = OTHER; note = cytidine-3'-phosphate
  modified_base 6: mod_base = OTHER; note = cytidine-3'-phosphate
  modified_base 7: mod_base = OTHER; note = uridine-3'-phosphate
  modified_base 8: mod_base = OTHER; note = uridine-3'-phosphate
  modified_base 9: mod_base = OTHER; note = guanosine-3'-phosphate
  modified_base 10: mod_base = OTHER; note = adenosine-3'-phosphate
  modified_base 11: mod_base = OTHER; note = uridine-3'-phosphate
  modified_base 12: mod_base = OTHER; note = guanosine-3'-phosphate
  modified_base 13: mod_base = OTHER; note = guanosine-3'-phosphate
  modified_base 14: mod_base = OTHER; note = guanosine-3'-phosphate
  modified_base 15: mod_base = OTHER; note = adenosine-3'-phosphate
  modified_base 16: mod_base = OTHER; note = uridine-3'-phosphate
  modified_base 17: mod_base = OTHER; note = adenosine-3'-phosphate
  modified_base 18: mod_base = OTHER; note = uridine-3'-phosphate
  modified_base 19: mod_base = OTHER; note = guanosine-3'-phosphate
  misc_feature 1..19: note = RNA
  misc_feature 20..21: note = DNA
tgcaccttgatgggatatgtt

SEQ ID NO: 2419 - DNA, 21 bp, synthetic construct
  source 1..21: mol_type = other DNA
  modified_base 1: mod_base = OTHER; note = uridine-3'-phosphate
  modified_base 2: mod_base = OTHER; note = uridine-3'-phosphate
  modified_base 3: mod_base = OTHER; note = adenosine-3'-phosphate
  modified_base 4: mod_base = OTHER; note = adenosine-3'-phosphate
  modified_base 5: mod_base = OTHER; note = cytidine-3'-phosphate
  modified_base 6: mod_base = OTHER; note = cytidine-3'-phosphate
  modified_base 7: mod_base = OTHER; note = uridine-3'-phosphate
  modified_base 8: mod_base = OTHER; note = guanosine-3'-phosphate
  modified_base 9: mod_base = OTHER; note = cytidine-3'-phosphate
  modified_base 10: mod_base = OTHER; note = adenosine-3'-phosphate
  modified_base 11: mod_base = OTHER; note = cytidine-3'-phosphate
  modified_base 12: mod_base = OTHER; note = cytidine-3'-phosphate
  modified_base 13: mod_base = OTHER; note = uridine-3'-phosphate
  modified_base 14: mod_base = OTHER; note = uridine-3'-phosphate
  modified_base 15: mod_base = OTHER; note = guanosine-3'-phosphate
  modified_base 16: mod_base = OTHER; note = adenosine-3'-phosphate
  modified_base 17: mod_base = OTHER; note = uridine-3'-phosphate
  modified_base 18: mod_base = OTHER; note = guanosine-3'-phosphate
  modified_base 19: mod_base = OTHER; note = guanosine-3'-phosphate
  misc_feature 1..19: note = RNA
  misc_feature 20..21: note = DNA
ttaacctgcaccttgatggtt

SEQ ID NO: 2420 - DNA, 21 bp, synthetic construct
  source 1..21: mol_type = other DNA
  modified_base 1: mod_base = OTHER; note = cytidine-3'-phosphate
  modified_base 2: mod_base = OTHER; note = adenosine-3'-phosphate
  modified_base 3: mod_base = OTHER; note = adenosine-3'-phosphate
  modified_base 4: mod_base = OTHER; note = guanosine-3'-phosphate
  modified_base 5: mod_base = OTHER; note = cytidine-3'-phosphate
  modified_base 6: mod_base = OTHER; note = guanosine-3'-phosphate
  modified_base 7: mod_base = OTHER; note = adenosine-3'-phosphate
  modified_base 8: mod_base = OTHER; note = adenosine-3'-phosphate
  modified_base 9: mod_base = OTHER; note = uridine-3'-phosphate
  modified_base 10: mod_base = OTHER; note = cytidine-3'-phosphate
  modified_base 11: mod_base = OTHER; note = uridine-3'-phosphate
  modified_base 12: mod_base = OTHER; note = uridine-3'-phosphate
  modified_base 13: mod_base = OTHER; note = uridine-3'-phosphate
  modified_base 14: mod_base = OTHER; note = adenosine-3'-phosphate
  modified_base 15: mod_base = OTHER; note = adenosine-3'-phosphate
  modified_base 16: mod_base = OTHER; note = cytidine-3'-phosphate
  modified_base 17: mod_base = OTHER; note = cytidine-3'-phosphate
  modified_base 18: mod_base = OTHER; note = uridine-3'-phosphate
  modified_base 19: mod_base = OTHER; note = guanosine-3'-phosphate
  misc_feature 1..19: note = RNA
  misc_feature 20..21: note = DNA
caagcgaatctttaacctgtt

SEQ ID NO: 2421 - DNA, 21 bp, synthetic construct
  source 1..21: mol_type = other DNA
  modified_base 1: mod_base = OTHER; note = uridine-3'-phosphate
  modified_base 2: mod_base = OTHER; note = adenosine-3'-phosphate
  modified_base 3: mod_base = OTHER; note = cytidine-3'-phosphate
  modified_base 4: mod_base = OTHER; note = cytidine-3'-phosphate
  modified_base 5: mod_base = OTHER; note = adenosine-3'-phosphate
  modified_base 6: mod_base = OTHER; note = adenosine-3'-phosphate
  modified_base 7: mod_base = OTHER; note = cytidine-3'-phosphate
  modified_base 8: mod_base = OTHER; note = uridine-3'-phosphate
  modified_base 9: mod_base = OTHER; note = guanosine-3'-phosphate
  modified_base 10: mod_base = OTHER; note = guanosine-3'-phosphate
  modified_base 11: mod_base = OTHER; note = uridine-3'-phosphate
  modified_base 12: mod_base = OTHER; note = cytidine-3'-phosphate
  modified_base 13: mod_base = OTHER; note = adenosine-3'-phosphate
  modified_base 14: mod_base = OTHER; note = adenosine-3'-phosphate
  modified_base 15: mod_base = OTHER; note = guanosine-3'-phosphate
  modified_base 16: mod_base = OTHER; note = cytidine-3'-phosphate
  modified_base 17: mod_base = OTHER; note = guanosine-3'-phosphate
  modified_base 18: mod_base = OTHER; note = adenosine-3'-phosphate
  modified_base 19: mod_base = OTHER; note = adenosine-3'-phosphate
  misc_feature 1..19: note = RNA
  misc_feature 20..21: note = DNA
taccaactggtcaagcgaatt

SEQ ID NO: 2422 - DNA, 21 bp, synthetic construct
  source 1..21: mol_type = other DNA
  modified_base 1: mod_base = OTHER; note = guanosine-3'-phosphate
  modified_base 2: mod_base = OTHER; note = adenosine-3'-phosphate
  modified_base 3: mod_base = OTHER; note = cytidine-3'-phosphate
  modified_base 4: mod_base = OTHER; note = uridine-3'-phosphate
  modified_base 5: mod_base = OTHER; note = cytidine-3'-phosphate
  modified_base 6: mod_base = OTHER; note = cytidine-3'-phosphate
  modified_base 7: mod_base = OTHER; note = uridine-3'-phosphate
  modified_base 8: mod_base = OTHER; note = cytidine-3'-phosphate
  modified_base 9: mod_base = OTHER; note = cytidine-3'-phosphate
  modified_base 10: mod_base = OTHER; note = uridine-3'-phosphate
  modified_base 11: mod_base = OTHER; note = adenosine-3'-phosphate
  modified_base 12: mod_base = OTHER; note = cytidine-3'-phosphate
  modified_base 13: mod_base = OTHER; note = cytidine-3'-phosphate
  modified_base 14: mod_base = OTHER; note = adenosine-3'-phosphate
  modified_base 15: mod_base = OTHER; note = adenosine-3'-phosphate
  modified_base 16: mod_base = OTHER; note = cytidine-3'-phosphate
  modified_base 17: mod_base = OTHER; note = uridine-3'-phosphate
  modified_base 18: mod_base = OTHER; note = guanosine-3'-phosphate
  modified_base 19: mod_base = OTHER; note = guanosine-3'-phosphate
  misc_feature 1..19: note = RNA
  misc_feature 20..21: note = DNA
gactcctcctaccaactggtt

SEQ ID NO: 2423 - DNA, 21 bp, synthetic construct
  source 1..21: mol_type = other DNA
  modified_base 1: mod_base = OTHER; note = guanosine-3'-phosphate
  modified_base 2: mod_base = OTHER; note = uridine-3'-phosphate
  modified_base 3: mod_base = OTHER; note = guanosine-3'-phosphate
  modified_base 4: mod_base = OTHER; note = uridine-3'-phosphate
  modified_base 5: mod_base = OTHER; note = uridine-3'-phosphate
  modified_base 6: mod_base = OTHER; note = adenosine-3'-phosphate
  modified_base 7: mod_base = OTHER; note = cytidine-3'-phosphate
  modified_base 8: mod_base = OTHER; note = uridine-3'-phosphate
  modified_base 9: mod_base = OTHER; note = guanosine-3'-phosphate
  modified_base 10: mod_base = OTHER; note = guanosine-3'-phosphate
  modified_base 11: mod_base = OTHER; note = guanosine-3'-phosphate
  modified_base 12: mod_base = OTHER; note = adenosine-3'-phosphate
  modified_base 13: mod_base = OTHER; note = cytidine-3'-phosphate
  modified_base 14: mod_base = OTHER; note = uridine-3'-phosphate
  modified_base 15: mod_base = OTHER; note = cytidine-3'-phosphate
  modified_base 16: mod_base = OTHER; note = cytidine-3'-phosphate
  modified_base 17: mod_base = OTHER; note = uridine-3'-phosphate
  modified_base 18: mod_base = OTHER; note = cytidine-3'-phosphate
  modified_base 19: mod_base = OTHER; note = cytidine-3'-phosphate
  misc_feature 1..19: note = RNA
  misc_feature 20..21: note = DNA
gtgttactgggactcctcctt

SEQ ID NO: 2424 - DNA, 21 bp, synthetic construct
  source 1..21: mol_type = other DNA
  modified_base 1: mod_base = OTHER; note = uridine-3'-phosphate
  modified_base 2: mod_base = OTHER; note = guanosine-3'-phosphate
  modified_base 3: mod_base = OTHER; note = uridine-3'-phosphate
  modified_base 4: mod_base = OTHER; note = guanosine-3'-phosphate
  modified_base 5: mod_base = OTHER; note = cytidine-3'-phosphate
  modified_base 6: mod_base = OTHER; note = adenosine-3'-phosphate
  modified_base 7: mod_base = OTHER; note = uridine-3'-phosphate
  modified_base 8: mod_base = OTHER; note = uridine-3'-phosphate
  modified_base 9: mod_base = OTHER; note = cytidine-3'-phosphate
  modified_base 10: mod_base = OTHER; note = adenosine-3'-phosphate
  modified_base 11: mod_base = OTHER; note = guanosine-3'-phosphate
  modified_base 12: mod_base = OTHER; note = uridine-3'-phosphate
  modified_base 13: mod_base = OTHER; note = guanosine-3'-phosphate
  modified_base 14: mod_base = OTHER; note = uridine-3'-phosphate
  modified_base 15: mod_base = OTHER; note = uridine-3'-phosphate
  modified_base 16: mod_base = OTHER; note = adenosine-3'-phosphate
  modified_base 17: mod_base = OTHER; note = cytidine-3'-phosphate
  modified_base 18: mod_base = OTHER; note = uridine-3'-phosphate
  modified_base 19: mod_base = OTHER; note = guanosine-3'-phosphate
  misc_feature 1..19: note = RNA
  misc_feature 20..21: note = DNA
tgtgcattcagtgttactgtt

SEQ ID NO: 2425 - DNA, 21 bp, synthetic construct
  source 1..21: mol_type = other DNA
  modified_base 1: mod_base = OTHER; note = adenosine-3'-phosphate
  modified_base 2: mod_base = OTHER; note = uridine-3'-phosphate
  modified_base 3: mod_base = OTHER; note = cytidine-3'-phosphate
  modified_base 4: mod_base = OTHER; note = adenosine-3'-phosphate
  modified_base 5: mod_base = OTHER; note = adenosine-3'-phosphate
  modified_base 6: mod_base = OTHER; note = uridine-3'-phosphate
  modified_base 7: mod_base = OTHER; note = uridine-3'-phosphate
  modified_base 8: mod_base = OTHER; note = guanosine-3'-phosphate
  modified_base 9: mod_base = OTHER; note = uridine-3'-phosphate
  modified_base 10: mod_base = OTHER; note = uridine-3'-phosphate
  modified_base 11: mod_base = OTHER; note = uridine-3'-phosphate
  modified_base 12: mod_base = OTHER; note = guanosine-3'-phosphate
  modified_base 13: mod_base = OTHER; note = uridine-3'-phosphate
  modified_base 14: mod_base = OTHER; note = guanosine-3'-phosphate
  modified_base 15: mod_base = OTHER; note = cytidine-3'-phosphate
  modified_base 16: mod_base = OTHER; note = adenosine-3'-phosphate
  modified_base 17: mod_base = OTHER; note = uridine-3'-phosphate
  modified_base 18: mod_base = OTHER; note = uridine-3'-phosphate
  modified_base 19: mod_base = OTHER; note = cytidine-3'-phosphate
  misc_feature 1..19: note = RNA
  misc_feature 20..21: note = DNA
atcaattgtttgtgcattctt

SEQ ID NO: 2426 - DNA, 21 bp, synthetic construct
  source 1..21: mol_type = other DNA
  modified_base 1: mod_base = OTHER; note = uridine-3'-phosphate
  modified_base 2: mod_base = OTHER; note = uridine-3'-phosphate
  modified_base 3: mod_base = OTHER; note = guanosine-3'-phosphate
  modified_base 4: mod_base = OTHER; note = guanosine-3'-phosphate
  modified_base 5: mod_base = OTHER; note = uridine-3'-phosphate
  modified_base 6: mod_base = OTHER; note = uridine-3'-phosphate
  modified_base 7: mod_base = OTHER; note = uridine-3'-phosphate
  modified_base 8: mod_base = OTHER; note = adenosine-3'-phosphate
  modified_base 9: mod_base = OTHER; note = cytidine-3'-phosphate
  modified_base 10: mod_base = OTHER; note = adenosine-3'-phosphate
  modified_base 11: mod_base = OTHER; note = uridine-3'-phosphate
  modified_base 12: mod_base = OTHER; note = cytidine-3'-phosphate
  modified_base 13: mod_base = OTHER; note = adenosine-3'-phosphate
  modified_base 14: mod_base = OTHER; note = adenosine-3'-phosphate
  modified_base 15: mod_base = OTHER; note = uridine-3'-phosphate
  modified_base 16: mod_base = OTHER; note = uridine-3'-phosphate
  modified_base 17: mod_base = OTHER; note = guanosine-3'-phosphate
  modified_base 18: mod_base = OTHER; note = uridine-3'-phosphate
  modified_base 19: mod_base = OTHER; note = uridine-3'-phosphate
  misc_feature 1..19: note = RNA
  misc_feature 20..21: note = DNA
ttggtttacatcaattgtttt

SEQ ID NO: 2427 - DNA, 21 bp, synthetic construct
  source 1..21: mol_type = other DNA
  modified_base 1: mod_base = OTHER; note = uridine-3'-phosphate
  modified_base 2: mod_base = OTHER; note = cytidine-3'-phosphate
  modified_base 3: mod_base = OTHER; note = adenosine-3'-phosphate
  modified_base 4: mod_base = OTHER; note = guanosine-3'-phosphate
  modified_base 5: mod_base = OTHER; note = adenosine-3'-phosphate
  modified_base 6: mod_base = OTHER; note = uridine-3'-phosphate
  modified_base 7: mod_base = OTHER; note = guanosine-3'-phosphate
  modified_base 8: mod_base = OTHER; note = uridine-3'-phosphate
  modified_base 9: mod_base = OTHER; note = cytidine-3'-phosphate
  modified_base 10: mod_base = OTHER; note = uridine-3'-phosphate
  modified_base 11: mod_base = OTHER; note = cytidine-3'-phosphate
  modified_base 12: mod_base = OTHER; note = uridine-3'-phosphate
  modified_base 13: mod_base = OTHER; note = uridine-3'-phosphate
  modified_base 14: mod_base = OTHER; note = guanosine-3'-phosphate
  modified_base 15: mod_base = OTHER; note = guanosine-3'-phosphate
  modified_base 16: mod_base = OTHER; note = uridine-3'-phosphate
  modified_base 17: mod_base = OTHER; note = uridine-3'-phosphate
  modified_base 18: mod_base = OTHER; note = uridine-3'-phosphate
  modified_base 19: mod_base = OTHER; note = adenosine-3'-phosphate
  misc_feature 1..19: note = RNA
  misc_feature 20..21: note = DNA
tcagatgtctcttggtttatt

SEQ ID NO: 2428 - DNA, 21 bp, synthetic construct
  source 1..21: mol_type = other DNA
  modified_base 1: mod_base = OTHER; note = cytidine-3'-phosphate
  modified_base 2: mod_base = OTHER; note = uridine-3'-phosphate
  modified_base 3: mod_base = OTHER; note = uridine-3'-phosphate
  modified_base 4: mod_base = OTHER; note = guanosine-3'-phosphate
  modified_base 5: mod_base = OTHER; note = guanosine-3'-phosphate
  modified_base 6: mod_base = OTHER; note = adenosine-3'-phosphate
  modified_base 7: mod_base = OTHER; note = uridine-3'-phosphate
  modified_base 8: mod_base = OTHER; note = cytidine-3'-phosphate
  modified_base 9: mod_base = OTHER; note = cytidine-3'-phosphate
  modified_base 10: mod_base = OTHER; note = adenosine-3'-phosphate
  modified_base 11: mod_base = OTHER; note = adenosine-3'-phosphate
  modified_base 12: mod_base = OTHER; note = guanosine-3'-phosphate
  modified_base 13: mod_base = OTHER; note = uridine-3'-phosphate
  modified_base 14: mod_base = OTHER; note = cytidine-3'-phosphate
  modified_base 15: mod_base = OTHER; note = adenosine-3'-phosphate
  modified_base 16: mod_base = OTHER; note = guanosine-3'-phosphate
  modified_base 17: mod_base = OTHER; note = adenosine-3'-phosphate
  modified_base 18: mod_base = OTHER; note = uridine-3'-phosphate
  modified_base 19: mod_base = OTHER; note = guanosine-3'-phosphate
  misc_feature 1..19: note = RNA
  misc_feature 20..21: note = DNA
cttggatccaagtcagatgtt

SEQ ID NO: 2429 - DNA, 21 bp, synthetic construct
  source 1..21: mol_type = other DNA
  modified_base 1: mod_base = OTHER; note = uridine-3'-phosphate
  modified_base 2: mod_base = OTHER; note = uridine-3'-phosphate
  modified_base 3: mod_base = OTHER; note = adenosine-3'-phosphate
  modified_base 4: mod_base = OTHER; note = cytidine-3'-phosphate
  modified_base 5: mod_base = OTHER; note = adenosine-3'-phosphate
  modified_base 6: mod_base = OTHER; note = cytidine-3'-phosphate
  modified_base 7: mod_base = OTHER; note = uridine-3'-phosphate
  modified_base 8: mod_base = OTHER; note = uridine-3'-phosphate
  modified_base 9: mod_base = OTHER; note = uridine-3'-phosphate
  modified_base 10: mod_base = OTHER; note = uridine-3'-phosphate
  modified_base 11: mod_base = OTHER; note = guanosine-3'-phosphate
  modified_base 12: mod_base = OTHER; note = cytidine-3'-phosphate
  modified_base 13: mod_base = OTHER; note = uridine-3'-phosphate
  modified_base 14: mod_base = OTHER; note = uridine-3'-phosphate
  modified_base 15: mod_base = OTHER; note = guanosine-3'-phosphate
  modified_base 16: mod_base = OTHER; note = guanosine-3'-phosphate
  modified_base 17: mod_base = OTHER; note = adenosine-3'-phosphate
  modified_base 18: mod_base = OTHER; note = uridine-3'-phosphate
  modified_base 19: mod_base = OTHER; note = cytidine-3'-phosphate
  misc_feature 1..19: note = RNA
  misc_feature 20..21: note = DNA
ttacacttttgcttggatctt

SEQ ID NO: 2430 - DNA, 21 bp, synthetic construct
  source 1..21: mol_type = other DNA
  modified_base 1: mod_base = OTHER; note = adenosine-3'-phosphate
  modified_base 2: mod_base = OTHER; note = adenosine-3'-phosphate
  modified_base 3: mod_base = OTHER; note = cytidine-3'-phosphate
  modified_base 4: mod_base = OTHER; note = adenosine-3'-phosphate
  modified_base 5: mod_base = OTHER; note = cytidine-3'-phosphate
  modified_base 6: mod_base = OTHER; note = guanosine-3'-phosphate
  modified_base 7: mod_base = OTHER; note = uridine-3'-phosphate
  modified_base 8: mod_base = OTHER; note = guanosine-3'-phosphate
  modified_base 9: mod_base = OTHER; note = uridine-3'-phosphate
  modified_base 10: mod_base = OTHER; note = uridine-3'-phosphate
  modified_base 11: mod_base = OTHER; note = adenosine-3'-phosphate
  modified_base 12: mod_base = OTHER; note = cytidine-3'-phosphate
  modified_base 13: mod_base = OTHER; note = adenosine-3'-phosphate
  modified_base 14: mod_base = OTHER; note = cytidine-3'-phosphate
  modified_base 15: mod_base = OTHER; note = uridine-3'-phosphate
  modified_base 16: mod_base = OTHER; note = uridine-3'-phosphate
  modified_base 17: mod_base = OTHER; note = uridine-3'-phosphate
  modified_base 18: mod_base = OTHER; note = uridine-3'-phosphate
  modified_base 19: mod_base = OTHER; note = guanosine-3'-phosphate
  misc_feature 1..19: note = RNA
  misc_feature 20..21: note = DNA
aacacgtgttacacttttgtt

SEQ ID NO: 2431 - DNA, 21 bp, synthetic construct
  source 1..21: mol_type = other DNA
  modified_base 1: mod_base = OTHER; note = uridine-3'-phosphate
  modified_base 2: mod_base = OTHER; note = cytidine-3'-phosphate
  modified_base 3: mod_base = OTHER; note = cytidine-3'-phosphate
  modified_base 4: mod_base = OTHER; note = adenosine-3'-phosphate
  modified_base 5: mod_base = OTHER; note = uridine-3'-phosphate
  modified_base 6: mod_base = OTHER; note = cytidine-3'-phosphate
  modified_base 7: mod_base = OTHER; note = adenosine-3'-phosphate
  modified_base 8: mod_base = OTHER; note = uridine-3'-phosphate
  modified_base 9: mod_base = OTHER; note = cytidine-3'-phosphate
  modified_base 10: mod_base = OTHER; note = adenosine-3'-phosphate
  modified_base 11: mod_base = OTHER; note = adenosine-3'-phosphate
  modified_base 12: mod_base = OTHER; note = cytidine-3'-phosphate
  modified_base 13: mod_base = OTHER; note = adenosine-3'-phosphate
  modified_base 14: mod_base = OTHER; note = cytidine-3'-phosphate
  modified_base 15: mod_base = OTHER; note = guanosine-3'-phosphate
  modified_base 16: mod_base = OTHER; note = uridine-3'-phosphate
  modified_base 17: mod_base = OTHER; note = guanosine-3'-phosphate
  modified_base 18: mod_base = OTHER; note = uridine-3'-phosphate
  modified_base 19: mod_base = OTHER; note = uridine-3'-phosphate
  misc_feature 1..19: note = RNA
  misc_feature 20..21: note = DNA
tccatcatcaacacgtgtttt

SEQ ID NO: 2432 - DNA, 21 bp, synthetic construct
  source 1..21: mol_type = other DNA
  modified_base 1: mod_base = OTHER; note = adenosine-3'-phosphate
  modified_base 2: mod_base = OTHER; note = adenosine-3'-phosphate
  modified_base 3: mod_base = OTHER; note = adenosine-3'-phosphate
  modified_base 4: mod_base = OTHER; note = guanosine-3'-phosphate
  modified_base 5: mod_base = OTHER; note = guanosine-3'-phosphate
  modified_base 6: mod_base = OTHER; note = adenosine-3'-phosphate
  modified_base 7: mod_base = OTHER; note = adenosine-3'-phosphate
  modified_base 8: mod_base = OTHER; note = guanosine-3'-phosphate
  modified_base 9: mod_base = OTHER; note = cytidine-3'-phosphate
  modified_base 10: mod_base = OTHER; note = uridine-3'-phosphate
  modified_base 11: mod_base = OTHER; note = adenosine-3'-phosphate
  modified_base 12: mod_base = OTHER; note = cytidine-3'-phosphate
  modified_base 13: mod_base = OTHER; note = uridine-3'-phosphate
  modified_base 14: mod_base = OTHER; note = cytidine-3'-phosphate
  modified_base 15: mod_base = OTHER; note = cytidine-3'-phosphate
  modified_base 16: mod_base = OTHER; note = adenosine-3'-phosphate
  modified_base 17: mod_base = OTHER; note = uridine-3'-phosphate
  modified_base 18: mod_base = OTHER; note = cytidine-3'-phosphate
  modified_base 19: mod_base = OTHER; note = adenosine-3'-phosphate
  misc_feature 1..19: note = RNA
  misc_feature 20..21: note = DNA
aaaggaagctactccatcatt

SEQ ID NO: 2433 - DNA, 21 bp, synthetic construct
  source 1..21: mol_type = other DNA
  modified_base 1: mod_base = OTHER; note = uridine-3'-phosphate
  modified_base 2: mod_base = OTHER; note = adenosine-3'-phosphate
  modified_base 3: mod_base = OTHER; note = adenosine-3'-phosphate
  modified_base 4: mod_base = OTHER; note = guanosine-3'-phosphate
  modified_base 5: mod_base = OTHER; note = cytidine-3'-phosphate
  modified_base 6: mod_base = OTHER; note = adenosine-3'-phosphate
  modified_base 7: mod_base = OTHER; note = cytidine-3'-phosphate
  modified_base 8: mod_base = OTHER; note = adenosine-3'-phosphate
  modified_base 9: mod_base = OTHER; note = adenosine-3'-phosphate
  modified_base 10: mod_base = OTHER; note = adenosine-3'-phosphate
  modified_base 11: mod_base = OTHER; note = guanosine-3'-phosphate
  modified_base 12: mod_base = OTHER; note = guanosine-3'-phosphate
  modified_base 13: mod_base = OTHER; note = adenosine-3'-phosphate
  modified_base 14: mod_base = OTHER; note = adenosine-3'-phosphate
  modified_base 15: mod_base = OTHER; note = guanosine-3'-phosphate
  modified_base 16: mod_base = OTHER; note = cytidine-3'-phosphate
  modified_base 17: mod_base = OTHER; note = uridine-3'-phosphate
  modified_base 18: mod_base = OTHER; note = adenosine-3'-phosphate
  modified_base 19: mod_base = OTHER; note = cytidine-3'-phosphate
  misc_feature 1..19: note = RNA
  misc_feature 20..21: note = DNA
taagcacaaaggaagctactt

SEQ ID NO: 2434 - DNA, 21 bp, synthetic construct
  source 1..21: mol_type = other DNA
  modified_base 1: mod_base = OTHER; note = uridine-3'-phosphate
  modified_base 2: mod_base = OTHER; note = cytidine-3'-phosphate
  modified_base 3: mod_base = OTHER; note = cytidine-3'-phosphate
  modified_base 4: mod_base = OTHER; note = adenosine-3'-phosphate
  modified_base 5: mod_base = OTHER; note = guanosine-3'-phosphate
  modified_base 6: mod_base = OTHER; note = adenosine-3'-phosphate
  modified_base 7: mod_base = OTHER; note = uridine-3'-phosphate
  modified_base 8: mod_base = OTHER; note = guanosine-3'-phosphate
  modified_base 9: mod_base = OTHER; note = guanosine-3'-phosphate
  modified_base 10: mod_base = OTHER; note = guanosine-3'-phosphate
  modified_base 11: mod_base = OTHER; note = adenosine-3'-phosphate
  modified_base 12: mod_base = OTHER; note = guanosine-3'-phosphate
  modified_base 13: mod_base = OTHER; note = adenosine-3'-phosphate
  modified_base 14: mod_base = OTHER; note = uridine-3'-phosphate
  modified_base 15: mod_base = OTHER; note = uridine-3'-phosphate
  modified_base 16: mod_base = OTHER; note = adenosine-3'-phosphate
  modified_base 17: mod_base = OTHER; note = adenosine-3'-phosphate
  modified_base 18: mod_base = OTHER; note = guanosine-3'-phosphate
  modified_base 19: mod_base = OTHER; note = cytidine-3'-phosphate
  misc_feature 1..19: note = RNA
  misc_feature 20..21: note = DNA
tccagatgggagattaagctt

SEQ ID NO: 2435 - DNA, 21 bp, synthetic construct
  source 1..21: mol_type = other DNA
  modified_base 1: mod_base = OTHER; note = guanosine-3'-phosphate
  modified_base 2: mod_base = OTHER; note = cytidine-3'-phosphate
  modified_base 3: mod_base = OTHER; note = adenosine-3'-phosphate
  modified_base 4: mod_base = OTHER; note = cytidine-3'-phosphate
  modified_base 5: mod_base = OTHER; note = cytidine-3'-phosphate
  modified_base 6: mod_base = OTHER; note = guanosine-3'-phosphate
  modified_base 7: mod_base = OTHER; note = uridine-3'-phosphate
  modified_base 8: mod_base = OTHER; note = cytidine-3'-phosphate
  modified_base 9: mod_base = OTHER; note = adenosine-3'-phosphate
  modified_base 10: mod_base = OTHER; note = cytidine-3'-phosphate
  modified_base 11: mod_base = OTHER; note = uridine-3'-phosphate
  modified_base 12: mod_base = OTHER; note = cytidine-3'-phosphate
  modified_base 13: mod_base = OTHER; note = cytidine-3'-phosphate
  modified_base 14: mod_base = OTHER; note = adenosine-3'-phosphate
  modified_base 15: mod_base = OTHER; note = guanosine-3'-phosphate
  modified_base 16: mod_base = OTHER; note = adenosine-3'-phosphate
  modified_base 17: mod_base = OTHER; note = uridine-3'-phosphate
  modified_base 18: mod_base = OTHER; note = guanosine-3'-phosphate
  modified_base 19: mod_base = OTHER; note = guanosine-3'-phosphate
  misc_feature 1..19: note = RNA
  misc_feature 20..21: note = DNA
gcaccgtcactccagatggtt

SEQ ID NO: 2436 - DNA, 21 bp, synthetic construct
  source 1..21: mol_type = other DNA
  modified_base 1: mod_base = OTHER; note = uridine-3'-phosphate
  modified_base 2: mod_base = OTHER; note = uridine-3'-phosphate
  modified_base 3: mod_base = OTHER; note = adenosine-3'-phosphate
  modified_base 4: mod_base = OTHER; note = adenosine-3'-phosphate
  modified_base 5: mod_base = OTHER; note = adenosine-3'-phosphate
  modified_base 6: mod_base = OTHER; note = cytidine-3'-phosphate
  modified_base 7: mod_base = OTHER; note = uridine-3'-phosphate
  modified_base 8: mod_base = OTHER; note = cytidine-3'-phosphate
  modified_base 9: mod_base = OTHER; note = cytidine-3'-phosphate
  modified_base 10: mod_base = OTHER; note = adenosine-3'-phosphate
  modified_base 11: mod_base = OTHER; note = guanosine-3'-phosphate
  modified_base 12: mod_base = OTHER; note = cytidine-3'-phosphate
  modified_base 13: mod_base = OTHER; note = adenosine-3'-phosphate
  modified_base 14: mod_base = OTHER; note = cytidine-3'-phosphate
  modified_base 15: mod_base = OTHER; note = cytidine-3'-phosphate
  modified_base 16: mod_base = OTHER; note = guanosine-3'-phosphate
  modified_base 17: mod_base = OTHER; note = uridine-3'-phosphate
  modified_base 18: mod_base = OTHER; note = cytidine-3'-phosphate
  modified_base 19: mod_base = OTHER; note = adenosine-3'-phosphate
  misc_feature 1..19: note = RNA
  misc_feature 20..21: note = DNA
ttaaactccagcaccgtcatt

SEQ ID NO: 2437 - DNA, 21 bp, synthetic construct
  source 1..21: mol_type = other DNA
  modified_base 1: mod_base = OTHER; note = uridine-3'-phosphate
  modified_base 2: mod_base = OTHER; note = uridine-3'-phosphate
  modified_base 3: mod_base = OTHER; note = uridine-3'-phosphate
  modified_base 4: mod_base = OTHER; note = guanosine-3'-phosphate
  modified_base 5: mod_base = OTHER; note = adenosine-3'-phosphate
  modified_base 6: mod_base = OTHER; note = cytidine-3'-phosphate
  modified_base 7: mod_base = OTHER; note = adenosine-3'-phosphate
  modified_base 8: mod_base = OTHER; note = uridine-3'-phosphate
  modified_base 9: mod_base = OTHER; note = uridine-3'-phosphate
  modified_base 10: mod_base = OTHER; note = adenosine-3'-phosphate
  modified_base 11: mod_base = OTHER; note = adenosine-3'-phosphate
  modified_base 12: mod_base = OTHER; note = adenosine-3'-phosphate
  modified_base 13: mod_base = OTHER; note = cytidine-3'-phosphate
  modified_base 14: mod_base = OTHER; note = uridine-3'-phosphate
  modified_base 15: mod_base = OTHER; note = cytidine-3'-phosphate
  modified_base 16: mod_base = OTHER; note = cytidine-3'-phosphate
  modified_base 17: mod_base = OTHER; note = adenosine-3'-phosphate
  modified_base 18: mod_base = OTHER; note = guanosine-3'-phosphate
  modified_base 19: mod_base = OTHER; note = cytidine-3'-phosphate
  misc_feature 1..19: note = RNA
  misc_feature 20..21: note = DNA
tttgacattaaactccagctt

SEQ ID NO: 2438 - DNA, 21 bp, synthetic construct
  source 1..21: mol_type = other DNA
  modified_base 1: mod_base = OTHER; note = uridine-3'-phosphate
  modified_base 2: mod_base = OTHER; note = guanosine-3'-phosphate
  modified_base 3: mod_base = OTHER; note = guanosine-3'-phosphate
  modified_base 4: mod_base = OTHER; note = adenosine-3'-phosphate
  modified_base 5: mod_base = OTHER; note = guanosine-3'-phosphate
  modified_base 6: mod_base = OTHER; note = cytidine-3'-phosphate
  modified_base 7: mod_base = OTHER; note = adenosine-3'-phosphate
  modified_base 8: mod_base = OTHER; note = uridine-3'-phosphate
  modified_base 9: mod_base = OTHER; note = cytidine-3'-phosphate
  modified_base 10: mod_base = OTHER; note = adenosine-3'-phosphate
  modified_base 11: mod_base = OTHER; note = guanosine-3'-phosphate
  modified_base 12: mod_base = OTHER; note = uridine-3'-phosphate
  modified_base 13: mod_base = OTHER; note = uridine-3'-phosphate
  modified_base 14: mod_base = OTHER; note = uridine-3'-phosphate
  modified_base 15: mod_base = OTHER; note = uridine-3'-phosphate
  modified_base 16: mod_base = OTHER; note = guanosine-3'-phosphate
  modified_base 17: mod_base = OTHER; note = adenosine-3'-phosphate
  modified_base 18: mod_base = OTHER; note = cytidine-3'-phosphate
  modified_base 19: mod_base = OTHER; note = adenosine-3'-phosphate
  misc_feature 1..19: note = RNA
  misc_feature 20..21: note = DNA
tggagcatcagttttgacatt

SEQ ID NO: 2439 - DNA, 21 bp, synthetic construct
  source 1..21: mol_type = other DNA
  modified_base 1: mod_base = OTHER; note = cytidine-3'-phosphate
  modified_base 2: mod_base = OTHER; note = uridine-3'-phosphate
  modified_base 3: mod_base = OTHER; note = guanosine-3'-phosphate
  modified_base 4: mod_base = OTHER; note = guanosine-3'-phosphate
  modified_base 5: mod_base = OTHER; note = adenosine-3'-phosphate
  modified_base 6: mod_base = OTHER; note = adenosine-3'-phosphate
  modified_base 7: mod_base = OTHER; note = guanosine-3'-phosphate
  modified_base 8: mod_base = OTHER; note = adenosine-3'-phosphate
  modified_base 9: mod_base = OTHER; note = uridine-3'-phosphate
  modified_base 10: mod_base = OTHER; note = cytidine-3'-phosphate
  modified_base 11: mod_base = OTHER; note = uridine-3'-phosphate
  modified_base 12: mod_base = OTHER; note = guanosine-3'-phosphate
  modified_base 13: mod_base = OTHER; note = guanosine-3'-phosphate
  modified_base 14: mod_base = OTHER; note = adenosine-3'-phosphate
  modified_base 15: mod_base = OTHER; note = guanosine-3'-phosphate
  modified_base 16: mod_base = OTHER; note = cytidine-3'-phosphate
  modified_base 17: mod_base = OTHER; note = adenosine-3'-phosphate
  modified_base 18: mod_base = OTHER; note = uridine-3'-phosphate
  modified_base 19: mod_base = OTHER; note = cytidine-3'-phosphate
  misc_feature 1..19: note = RNA
  misc_feature 20..21: note = DNA
ctggaagatctggagcatctt

SEQ ID NO: 2440 - DNA, 21 bp, synthetic construct
  source 1..21: mol_type = other DNA
  modified_base 1: mod_base = OTHER; note = uridine-3'-phosphate
  modified_base 2: mod_base = OTHER; note = uridine-3'-phosphate
  modified_base 3: mod_base = OTHER; note = uridine-3'-phosphate
  modified_base 4: mod_base = OTHER; note = uridine-3'-phosphate
  modified_base 5: mod_base = OTHER; note = cytidine-3'-phosphate
  modified_base 6: mod_base = OTHER; note = uridine-3'-phosphate
  modified_base 7: mod_base = OTHER; note = uridine-3'-phosphate
  modified_base 8: mod_base = OTHER; note = cytidine-3'-phosphate
  modified_base 9: mod_base = OTHER; note = uridine-3'-phosphate
  modified_base 10: mod_base = OTHER; note = guanosine-3'-phosphate
  modified_base 11: mod_base = OTHER; note = guanosine-3'-phosphate
  modified_base 12: mod_base = OTHER; note = adenosine-3'-phosphate
  modified_base 13: mod_base = OTHER; note = adenosine-3'-phosphate
  modified_base 14: mod_base = OTHER; note = guanosine-3'-phosphate
  modified_base 15: mod_base = OTHER; note = adenosine-3'-phosphate
  modified_base 16: mod_base = OTHER; note = uridine-3'-phosphate
  modified_base 17: mod_base = OTHER; note = cytidine-3'-phosphate
  modified_base 18: mod_base = OTHER; note = uridine-3'-phosphate
  modified_base 19: mod_base = OTHER; note = guanosine-3'-phosphate
  misc_feature 1..19: note = RNA
  misc_feature 20..21: note = DNA
ttttcttctggaagatctgtt

SEQ ID NO: 2441 - DNA, 21 bp, synthetic construct
  source 1..21: mol_type = other DNA
  modified_base 1: mod_base = OTHER; note = uridine-3'-phosphate
  modified_base 2: mod_base = OTHER; note = uridine-3'-phosphate
  modified_base 3: mod_base = OTHER; note = cytidine-3'-phosphate
  modified_base 4: mod_base = OTHER; note = cytidine-3'-phosphate
  modified_base 5: mod_base = OTHER; note = cytidine-3'-phosphate
  modified_base 6: mod_base = OTHER; note = uridine-3'-phosphate
  modified_base 7: mod_base = OTHER; note = guanosine-3'-phosphate
  modified_base 8: mod_base = OTHER; note = guanosine-3'-phosphate
  modified_base 9: mod_base = OTHER; note = cytidine-3'-phosphate
  modified_base 10: mod_base = OTHER; note = cytidine-3'-phosphate
  modified_base 11: mod_base = OTHER; note = uridine-3'-phosphate
  modified_base 12: mod_base = OTHER; note = guanosine-3'-phosphate
  modified_base 13: mod_base = OTHER; note = adenosine-3'-phosphate
  modified_base 14: mod_base = OTHER; note = uridine-3'-phosphate
  modified_base 15: mod_base = OTHER; note = uridine-3'-phosphate
  modified_base 16: mod_base = OTHER; note = uridine-3'-phosphate
  modified_base 17: mod_base = OTHER; note = uridine-3'-phosphate
  modified_base 18: mod_base = OTHER; note = cytidine-3'-phosphate
  modified_base 19: mod_base = OTHER; note = uridine-3'-phosphate
  misc_feature 1..19: note = RNA
  misc_feature 20..21: note = DNA
ttccctggcctgattttcttt

SEQ ID NO: 2442 - DNA, 21 bp, synthetic construct
  source 1..21: mol_type = other DNA
  modified_base 1: mod_base = OTHER; note = uridine-3'-phosphate
  modified_base 2: mod_base = OTHER; note = cytidine-3'-phosphate
  modified_base 3: mod_base = OTHER; note = guanosine-3'-phosphate
  modified_base 4: mod_base = OTHER; note = guanosine-3'-phosphate
  modified_base 5: mod_base = OTHER; note = uridine-3'-phosphate
  modified_base 6: mod_base = OTHER; note = adenosine-3'-phosphate
  modified_base 7: mod_base = OTHER; note = adenosine-3'-phosphate
  modified_base 8: mod_base = OTHER; note = cytidine-3'-phosphate
  modified_base 9: mod_base = OTHER; note = cytidine-3'-phosphate
  modified_base 10: mod_base = OTHER; note = uridine-3'-phosphate
  modified_base 11: mod_base = OTHER; note = uridine-3'-phosphate
  modified_base 12: mod_base = OTHER; note = cytidine-3'-phosphate
  modified_base 13: mod_base = OTHER; note = cytidine-3'-phosphate
  modified_base 14: mod_base = OTHER; note = cytidine-3'-phosphate
  modified_base 15: mod_base = OTHER; note = uridine-3'-phosphate
  modified_base 16: mod_base = OTHER; note = guanosine-3'-phosphate
  modified_base 17: mod_base = OTHER; note = guanosine-3'-phosphate
  modified_base 18: mod_base = OTHER; note = cytidine-3'-phosphate
  modified_base 19: mod_base = OTHER; note = cytidine-3'-phosphate
  misc_feature 1..19: note = RNA
  misc_feature 20..21: note = DNA
tcggtaaccttccctggcctt

SEQ ID NO: 2443 - DNA, 21 bp, synthetic construct
  source 1..21: mol_type = other DNA
  modified_base 1: mod_base = OTHER; note = uridine-3'-phosphate
  modified_base 2: mod_base = OTHER; note = adenosine-3'-phosphate
  modified_base 3: mod_base = OTHER; note = uridine-3'-phosphate
  modified_base 4: mod_base = OTHER; note = guanosine-3'-phosphate
  modified_base 5: mod_base = OTHER; note = cytidine-3'-phosphate
  modified_base 6: mod_base = OTHER; note = uridine-3'-phosphate
  modified_base 7: mod_base = OTHER; note = adenosine-3'-phosphate
  modified_base 8: mod_base = OTHER; note = uridine-3'-phosphate
  modified_base 9: mod_base = OTHER; note = uridine-3'-phosphate
  modified_base 10: mod_base = OTHER; note = guanosine-3'-phosphate
  modified_base 11: mod_base = OTHER; note = cytidine-3'-phosphate
  modified_base 12: mod_base = OTHER; note = uridine-3'-phosphate
  modified_base 13: mod_base = OTHER; note = cytidine-3'-phosphate
  modified_base 14: mod_base = OTHER; note = guanosine-3'-phosphate
  modified_base 15: mod_base = OTHER; note = guanosine-3'-phosphate
  modified_base 16: mod_base = OTHER; note = uridine-3'-phosphate
  modified_base 17: mod_base = OTHER; note = adenosine-3'-phosphate
  modified_base 18: mod_base = OTHER; note = adenosine-3'-phosphate
  modified_base 19: mod_base = OTHER; note = cytidine-3'-phosphate
  misc_feature 1..19: note = RNA
  misc_feature 20..21: note = DNA
tatgctattgctcggtaactt

SEQ ID NO: 2444 - DNA, 21 bp, synthetic construct
  source 1..21: mol_type = other DNA
  modified_base 1: mod_base = OTHER; note = uridine-3'-phosphate
  modified_base 2: mod_base = OTHER; note = guanosine-3'-phosphate
  modified_base 3: mod_base = OTHER; note = adenosine-3'-phosphate
  modified_base 4: mod_base = OTHER; note = guanosine-3'-phosphate
  modified_base 5: mod_base = OTHER; note = adenosine-3'-phosphate
  modified_base 6: mod_base = OTHER; note = guanosine-3'-phosphate
  modified_base 7: mod_base = OTHER; note = adenosine-3'-phosphate
  modified_base 8: mod_base = OTHER; note = uridine-3'-phosphate
  modified_base 9: mod_base = OTHER; note = guanosine-3'-phosphate
  modified_base 10: mod_base = OTHER; note = adenosine-3'-phosphate
  modified_base 11: mod_base = OTHER; note = guanosine-3'-phosphate
  modified_base 12: mod_base = OTHER; note = uridine-3'-phosphate
  modified_base 13: mod_base = OTHER; note = adenosine-3'-phosphate
  modified_base 14: mod_base = OTHER; note = uridine-3'-phosphate
  modified_base 15: mod_base = OTHER; note = guanosine-3'-phosphate
  modified_base 16: mod_base = OTHER; note = cytidine-3'-phosphate
  modified_base 17: mod_base = OTHER; note = uridine-3'-phosphate
  modified_base 18: mod_base = OTHER; note = adenosine-3'-phosphate
  modified_base 19: mod_base = OTHER; note = uridine-3'-phosphate
  misc_feature 1..19: note = RNA
  misc_feature 20..21: note = DNA
tgagagatgagtatgctattt

SEQ ID NO: 2445 - DNA, 21 bp, synthetic construct
  source 1..21: mol_type = other DNA
  modified_base 1: mod_base = OTHER; note = uridine-3'-phosphate
  modified_base 2: mod_base = OTHER; note = uridine-3'-phosphate
  modified_base 3: mod_base = OTHER; note = uridine-3'-phosphate
  modified_base 4: mod_base = OTHER; note = guanosine-3'-phosphate
  modified_base 5: mod_base = OTHER; note = guanosine-3'-phosphate
  modified_base 6: mod_base = OTHER; note = cytidine-3'-phosphate
  modified_base 7: mod_base = OTHER; note = uridine-3'-phosphate
  modified_base 8: mod_base = OTHER; note = guanosine-3'-phosphate
  modified_base 9: mod_base = OTHER; note = adenosine-3'-phosphate
  modified_base 10: mod_base = OTHER; note = guanosine-3'-phosphate
  modified_base 11: mod_base = OTHER; note = adenosine-3'-phosphate
  modified_base 12: mod_base = OTHER; note = guanosine-3'-phosphate
  modified_base 13: mod_base = OTHER; note = adenosine-3'-phosphate
  modified_base 14: mod_base = OTHER; note = uridine-3'-phosphate
  modified_base 15: mod_base = OTHER; note = guanosine-3'-phosphate
  modified_base 16: mod_base = OTHER; note = adenosine-3'-phosphate
  modified_base 17: mod_base = OTHER; note = guanosine-3'-phosphate
  modified_base 18: mod_base = OTHER; note = uridine-3'-phosphate
  modified_base 19: mod_base = OTHER; note = adenosine-3'-phosphate
  misc_feature 1..19: note = RNA
  misc_feature 20..21: note = DNA
tttggctgagagatgagtatt

SEQ ID NO: 2446 - DNA, 21 bp, synthetic construct
  source 1..21: mol_type = other DNA
  modified_base 1: mod_base = OTHER; note = adenosine-3'-phosphate
  modified_base 2: mod_base = OTHER; note = uridine-3'-phosphate
  modified_base 3: mod_base = OTHER; note = adenosine-3'-phosphate
  modified_base 4: mod_base = OTHER; note = uridine-3'-phosphate
  modified_base 5: mod_base = OTHER; note = adenosine-3'-phosphate
  modified_base 6: mod_base = OTHER; note = adenosine-3'-phosphate
  modified_base 7: mod_base = OTHER; note = adenosine-3'-phosphate
  modified_base 8: mod_base = OTHER; note = guanosine-3'-phosphate
  modified_base 9: mod_base = OTHER; note = guanosine-3'-phosphate
  modified_base 10: mod_base = OTHER; note = uridine-3'-phosphate
  modified_base 11: mod_base = OTHER; note = adenosine-3'-phosphate
  modified_base 12: mod_base = OTHER; note = adenosine-3'-phosphate
  modified_base 13: mod_base = OTHER; note = cytidine-3'-phosphate
  modified_base 14: mod_base = OTHER; note = uridine-3'-phosphate
  modified_base 15: mod_base = OTHER; note = uridine-3'-phosphate
  modified_base 16: mod_base = OTHER; note = uridine-3'-phosphate
  modified_base 17: mod_base = OTHER; note = guanosine-3'-phosphate
  modified_base 18: mod_base = OTHER; note = guanosine-3'-phosphate
  modified_base 19: mod_base = OTHER; note = cytidine-3'-phosphate
  misc_feature 1..19: note = RNA
  misc_feature 20..21: note = DNA
atataaaggtaactttggctt

SEQ ID NO: 2447 - DNA, 21 bp, synthetic construct
  source 1..21: mol_type = other DNA
  modified_base 1: mod_base = OTHER; note = adenosine-3'-phosphate
  modified_base 2: mod_base = OTHER; note = guanosine-3'-phosphate
  modified_base 3: mod_base = OTHER; note = uridine-3'-phosphate
  modified_base 4: mod_base = OTHER; note = cytidine-3'-phosphate
  modified_base 5: mod_base = OTHER; note = cytidine-3'-phosphate
  modified_base 6: mod_base = OTHER; note = adenosine-3'-phosphate
  modified_base 7: mod_base = OTHER; note = adenosine-3'-phosphate
  modified_base 8: mod_base = OTHER; note = uridine-3'-phosphate
  modified_base 9: mod_base = OTHER; note = cytidine-3'-phosphate
  modified_base 10: mod_base = OTHER; note = adenosine-3'-phosphate
  modified_base 11: mod_base = OTHER; note = adenosine-3'-phosphate
  modified_base 12: mod_base = OTHER; note = uridine-3'-phosphate
  modified_base 13: mod_base = OTHER; note = adenosine-3'-phosphate
  modified_base 14: mod_base = OTHER; note = uridine-3'-phosphate
  modified_base 15: mod_base = OTHER; note = adenosine-3'-phosphate
  modified_base 16: mod_base = OTHER; note = adenosine-3'-phosphate
  modified_base 17: mod_base = OTHER; note = adenosine-3'-phosphate
  modified_base 18: mod_base = OTHER; note = guanosine-3'-phosphate
  modified_base 19: mod_base = OTHER; note = guanosine-3'-phosphate
  misc_feature 1..19: note = RNA
  misc_feature 20..21: note = DNA
agtccaatcaatataaaggtt

SEQ ID NO: 2448 - DNA, 21 bp, synthetic construct
  source 1..21: mol_type = other DNA
  modified_base 1: mod_base = OTHER; note = uridine-3'-phosphate
  modified_base 2: mod_base = OTHER; note = adenosine-3'-phosphate
  modified_base 3: mod_base = OTHER; note = uridine-3'-phosphate
  modified_base 4: mod_base = OTHER; note = guanosine-3'-phosphate
  modified_base 5: mod_base = OTHER; note = guanosine-3'-phosphate
  modified_base 6: mod_base = OTHER; note = uridine-3'-phosphate
  modified_base 7: mod_base = OTHER; note = uridine-3'-phosphate
  modified_base 8: mod_base = OTHER; note = adenosine-3'-phosphate
  modified_base 9: mod_base = OTHER; note = uridine-3'-phosphate
  modified_base 10: mod_base = OTHER; note = cytidine-3'-phosphate
  modified_base 11: mod_base = OTHER; note = adenosine-3'-phosphate
  modified_base 12: mod_base = OTHER; note = guanosine-3'-phosphate
  modified_base 13: mod_base = OTHER; note = uridine-3'-phosphate
  modified_base 14: mod_base = OTHER; note = cytidine-3'-phosphate
  modified_base 15: mod_base = OTHER; note = cytidine-3'-phosphate
  modified_base 16: mod_base = OTHER; note = adenosine-3'-phosphate
  modified_base 17: mod_base = OTHER; note = adenosine-3'-phosphate
  modified_base 18: mod_base = OTHER; note = uridine-3'-phosphate
  modified_base 19: mod_base = OTHER; note = cytidine-3'-phosphate
  misc_feature 1..19: note = RNA
  misc_feature 20..21: note = DNA
tatggttatcagtccaatctt

SEQ ID NO: 2449 - DNA, 21 bp, synthetic construct
  source 1..21: mol_type = other DNA
  modified_base 1: mod_base = OTHER; note = adenosine-3'-phosphate
  modified_base 2: mod_base = OTHER; note = adenosine-3'-phosphate
  modified_base 3: mod_base = OTHER; note = adenosine-3'-phosphate
  modified_base 4: mod_base = OTHER; note = guanosine-3'-phosphate
  modified_base 5: mod_base = OTHER; note = cytidine-3'-phosphate
  modified_base 6: mod_base = OTHER; note = cytidine-3'-phosphate
  modified_base 7: mod_base = OTHER; note = uridine-3'-phosphate
  modified_base 8: mod_base = OTHER; note = uridine-3'-phosphate
  modified_base 9: mod_base = OTHER; note = adenosine-3'-phosphate
  modified_base 10: mod_base = OTHER; note = uridine-3'-phosphate
  modified_base 11: mod_base = OTHER; note = guanosine-3'-phosphate
  modified_base 12: mod_base = OTHER; note = guanosine-3'-phosphate
  modified_base 13: mod_base = OTHER; note = uridine-3'-phosphate
  modified_base 14: mod_base = OTHER; note = uridine-3'-phosphate
  modified_base 15: mod_base = OTHER; note = adenosine-3'-phosphate
  modified_base 16: mod_base = OTHER; note = uridine-3'-phosphate
  modified_base 17: mod_base = OTHER; note = cytidine-3'-phosphate
  modified_base 18: mod_base = OTHER; note = adenosine-3'-phosphate
  modified_base 19: mod_base = OTHER; note = guanosine-3'-phosphate
  misc_feature 1..19: note = RNA
  misc_feature 20..21: note = DNA
aaagccttatggttatcagtt

SEQ ID NO: 2450 - DNA, 21 bp, synthetic construct
  source 1..21: mol_type = other DNA
  modified_base 1: mod_base = OTHER; note = uridine-3'-phosphate
  modified_base 2: mod_base = OTHER; note = cytidine-3'-phosphate
  modified_base 3: mod_base = OTHER; note = uridine-3'-phosphate
  modified_base 4: mod_base = OTHER; note = cytidine-3'-phosphate
  modified_base 5: mod_base = OTHER; note = cytidine-3'-phosphate
  modified_base 6: mod_base = OTHER; note = cytidine-3'-phosphate
  modified_base 7: mod_base = OTHER; note = adenosine-3'-phosphate
  modified_base 8: mod_base = OTHER; note = cytidine-3'-phosphate
  modified_base 9: mod_base = OTHER; note = uridine-3'-phosphate
  modified_base 10: mod_base = OTHER; note = adenosine-3'-phosphate
  modified_base 11: mod_base = OTHER; note = guanosine-3'-phosphate
  modified_base 12: mod_base = OTHER; note = cytidine-3'-phosphate
  modified_base 13: mod_base = OTHER; note = adenosine-3'-phosphate
  modified_base 14: mod_base = OTHER; note = adenosine-3'-phosphate
  modified_base 15: mod_base = OTHER; note = adenosine-3'-phosphate
  modified_base 16: mod_base = OTHER; note = guanosine-3'-phosphate
  modified_base 17: mod_base = OTHER; note = cytidine-3'-phosphate
  modified_base 18: mod_base = OTHER; note = cytidine-3'-phosphate
  modified_base 19: mod_base = OTHER; note = uridine-3'-phosphate
  misc_feature 1..19: note = RNA
  misc_feature 20..21: note = DNA
tctcccactagcaaagccttt

SEQ ID NO: 2451 - DNA, 21 bp, synthetic construct
  source 1..21: mol_type = other DNA
  modified_base 1: mod_base = OTHER; note = uridine-3'-phosphate
  modified_base 2: mod_base = OTHER; note = adenosine-3'-phosphate
  modified_base 3: mod_base = OTHER; note = uridine-3'-phosphate
  modified_base 4: mod_base = OTHER; note = uridine-3'-phosphate
  modified_base 5: mod_base = OTHER; note = cytidine-3'-phosphate
  modified_base 6: mod_base = OTHER; note = adenosine-3'-phosphate
  modified_base 7: mod_base = OTHER; note = guanosine-3'-phosphate
  modified_base 8: mod_base = OTHER; note = adenosine-3'-phosphate
  modified_base 9: mod_base = OTHER; note = uridine-3'-phosphate
  modified_base 10: mod_base = OTHER; note = guanosine-3'-phosphate
  modified_base 11: mod_base = OTHER; note = uridine-3'-phosphate
  modified_base 12: mod_base = OTHER; note = uridine-3'-phosphate
  modified_base 13: mod_base = OTHER; note = cytidine-3'-phosphate
  modified_base 14: mod_base = OTHER; note = uridine-3'-phosphate
  modified_base 15: mod_base = OTHER; note = cytidine-3'-phosphate
  modified_base 16: mod_base = OTHER; note = cytidine-3'-phosphate
  modified_base 17: mod_base = OTHER; note = cytidine-3'-phosphate
  modified_base 18: mod_base = OTHER; note = adenosine-3'-phosphate
  modified_base 19: mod_base = OTHER; note = cytidine-3'-phosphate
  misc_feature 1..19: note = RNA
  misc_feature 20..21: note = DNA
tattcagatgttctcccactt

SEQ ID NO: 2452 - DNA, 21 bp, synthetic construct
  source 1..21: mol_type = other DNA
  modified_base 1: mod_base = OTHER; note = uridine-3'-phosphate
  modified_base 2: mod_base = OTHER; note = adenosine-3'-phosphate
  modified_base 3: mod_base = OTHER; note = adenosine-3'-phosphate
  modified_base 4: mod_base = OTHER; note = cytidine-3'-phosphate
  modified_base 5: mod_base = OTHER; note = adenosine-3'-phosphate
  modified_base 6: mod_base = OTHER; note = adenosine-3'-phosphate
  modified_base 7: mod_base = OTHER; note = uridine-3'-phosphate
  modified_base 8: mod_base = OTHER; note = adenosine-3'-phosphate
  modified_base 9: mod_base = OTHER; note = adenosine-3'-phosphate
  modified_base 10: mod_base = OTHER; note = uridine-3'-phosphate
  modified_base 11: mod_base = OTHER; note = adenosine-3'-phosphate
  modified_base 12: mod_base = OTHER; note = uridine-3'-phosphate
  modified_base 13: mod_base = OTHER; note = uridine-3'-phosphate
  modified_base 14: mod_base = OTHER; note = cytidine-3'-phosphate
  modified_base 15: mod_base = OTHER; note = adenosine-3'-phosphate
  modified_base 16: mod_base = OTHER; note = guanosine-3'-phosphate
  modified_base 17: mod_base = OTHER; note = adenosine-3'-phosphate
  modified_base 18: mod_base = OTHER; note = uridine-3'-phosphate
  modified_base 19: mod_base = OTHER; note = guanosine-3'-phosphate
  misc_feature 1..19: note = RNA
  misc_feature 20..21: note = DNA
taacaataatattcagatgtt

SEQ ID NO: 2453 - DNA, 21 bp, synthetic construct
  source 1..21: mol_type = other DNA
  modified_base 1: mod_base = OTHER; note = uridine-3'-phosphate
  modified_base 2: mod_base = OTHER; note = uridine-3'-phosphate
  modified_base 3: mod_base = OTHER; note = uridine-3'-phosphate
  modified_base 4: mod_base = OTHER; note = guanosine-3'-phosphate
  modified_base 5: mod_base = OTHER; note = guanosine-3'-phosphate
  modified_base 6: mod_base = OTHER; note = guanosine-3'-phosphate
  modified_base 7: mod_base = OTHER; note = guanosine-3'-phosphate
  modified_base 8: mod_base = OTHER; note = guanosine-3'-phosphate
  modified_base 9: mod_base = OTHER; note = uridine-3'-phosphate
  modified_base 10: mod_base = OTHER; note = adenosine-3'-phosphate
  modified_base 11: mod_base = OTHER; note = adenosine-3'-phosphate
  modified_base 12: mod_base = OTHER; note = cytidine-3'-phosphate
  modified_base 13: mod_base = OTHER; note = adenosine-3'-phosphate
  modified_base 14: mod_base = OTHER; note = adenosine-3'-phosphate
  modified_base 15: mod_base = OTHER; note = uridine-3'-phosphate
  modified_base 16: mod_base = OTHER; note = adenosine-3'-phosphate
  modified_base 17: mod_base = OTHER; note = adenosine-3'-phosphate
  modified_base 18: mod_base = OTHER; note = uridine-3'-phosphate
  modified_base 19: mod_base = OTHER; note = adenosine-3'-phosphate
  misc_feature 1..19: note = RNA
  misc_feature 20..21: note = DNA
tttgggggtaacaataatatt

SEQ ID NO: 2454 - DNA, 21 bp, synthetic construct
  source 1..21: mol_type = other DNA
  modified_base 1: mod_base = OTHER; note = cytidine-3'-phosphate
  modified_base 2: mod_base = OTHER; note = adenosine-3'-phosphate
  modified_base 3: mod_base = OTHER; note = adenosine-3'-phosphate
  modified_base 4: mod_base = OTHER; note = uridine-3'-phosphate
  modified_base 5: mod_base = OTHER; note = adenosine-3'-phosphate
  modified_base 6: mod_base = OTHER; note = uridine-3'-phosphate
  modified_base 7: mod_base = OTHER; note = adenosine-3'-phosphate
  modified_base 8: mod_base = OTHER; note = uridine-3'-phosphate
  modified_base 9: mod_base = OTHER; note = guanosine-3'-phosphate
  modified_base 10: mod_base = OTHER; note = guanosine-3'-phosphate
  modified_base 11: mod_base = OTHER; note = guanosine-3'-phosphate
  modified_base 12: mod_base = OTHER; note = cytidine-3'-phosphate
  modified_base 13: mod_base = OTHER; note = uridine-3'-phosphate
  modified_base 14: mod_base = OTHER; note = uridine-3'-phosphate
  modified_base 15: mod_base = OTHER; note = uridine-3'-phosphate
  modified_base 16: mod_base = OTHER; note = uridine-3'-phosphate
  modified_base 17: mod_base = OTHER; note = guanosine-3'-phosphate
  modified_base 18: mod_base = OTHER; note = guanosine-3'-phosphate
  modified_base 19: mod_base = OTHER; note = guanosine-3'-phosphate
  misc_feature 1..19: note = RNA
  misc_feature 20..21: note = DNA
caatatatgggcttttgggtt

SEQ ID NO: 2455 - DNA, 21 bp, synthetic construct
  source 1..21: mol_type = other DNA
  modified_base 1: mod_base = OTHER; note = uridine-3'-phosphate
  modified_base 2: mod_base = OTHER; note = cytidine-3'-phosphate
  modified_base 3: mod_base = OTHER; note = adenosine-3'-phosphate
  modified_base 4: mod_base = OTHER; note = adenosine-3'-phosphate
  modified_base 5: mod_base = OTHER; note = uridine-3'-phosphate
  modified_base 6: mod_base = OTHER; note = adenosine-3'-phosphate
  modified_base 7: mod_base = OTHER; note = uridine-3'-phosphate
  modified_base 8: mod_base = OTHER; note = adenosine-3'-phosphate
  modified_base 9: mod_base = OTHER; note = uridine-3'-phosphate
  modified_base 10: mod_base = OTHER; note = guanosine-3'-phosphate
  modified_base 11: mod_base = OTHER; note = guanosine-3'-phosphate
  modified_base 12: mod_base = OTHER; note = guanosine-3'-phosphate
  modified_base 13: mod_base = OTHER; note = cytidine-3'-phosphate
  modified_base 14: mod_base = OTHER; note = uridine-3'-phosphate
  modified_base 15: mod_base = OTHER; note = uridine-3'-phosphate
  modified_base 16: mod_base = OTHER; note = uridine-3'-phosphate
  modified_base 17: mod_base = OTHER; note = uridine-3'-phosphate
  modified_base 18: mod_base = OTHER; note = guanosine-3'-phosphate
  modified_base 19: mod_base = OTHER; note = guanosine-3'-phosphate
  misc_feature 1..19: note = RNA
  misc_feature 20..21: note = DNA
tcaatatatgggcttttggtt

SEQ ID NO: 2456 - DNA, 21 bp, synthetic construct
  source 1..21: mol_type = other DNA
  modified_base 1: mod_base = OTHER; note = guanosine-3'-phosphate
  modified_base 2: mod_base = OTHER; note = uridine-3'-phosphate
  modified_base 3: mod_base = OTHER; note = cytidine-3'-phosphate
  modified_base 4: mod_base = OTHER; note = adenosine-3'-phosphate
  modified_base 5: mod_base = OTHER; note = adenosine-3'-phosphate
  modified_base 6: mod_base = OTHER; note = uridine-3'-phosphate
  modified_base 7: mod_base = OTHER; note = adenosine-3'-phosphate
  modified_base 8: mod_base = OTHER; note = uridine-3'-phosphate
  modified_base 9: mod_base = OTHER; note = adenosine-3'-phosphate
  modified_base 10: mod_base = OTHER; note = uridine-3'-phosphate
  modified_base 11: mod_base = OTHER; note = guanosine-3'-phosphate
  modified_base 12: mod_base = OTHER; note = guanosine-3'-phosphate
  modified_base 13: mod_base = OTHER; note = guanosine-3'-phosphate
  modified_base 14: mod_base = OTHER; note = cytidine-3'-phosphate
  modified_base 15: mod_base = OTHER; note = uridine-3'-phosphate
  modified_base 16: mod_base = OTHER; note = uridine-3'-phosphate
  modified_base 17: mod_base = OTHER; note = uridine-3'-phosphate
  modified_base 18: mod_base = OTHER; note = uridine-3'-phosphate
  modified_base 19: mod_base = OTHER; note = guanosine-3'-phosphate
  misc_feature 1..19: note = RNA
  misc_feature 20..21: note = DNA
gtcaatatatgggcttttgtt

SEQ ID NO: 2457 - DNA, 21 bp, synthetic construct
  source 1..21: mol_type = other DNA
  modified_base 1: mod_base = OTHER; note = uridine-3'-phosphate
  modified_base 2: mod_base = OTHER; note = guanosine-3'-phosphate
  modified_base 3: mod_base = OTHER; note = uridine-3'-phosphate
  modified_base 4: mod_base = OTHER; note = cytidine-3'-phosphate
  modified_base 5: mod_base = OTHER; note = adenosine-3'-phosphate
  modified_base 6: mod_base = OTHER; note = adenosine-3'-phosphate
  modified_base 7: mod_base = OTHER; note = uridine-3'-phosphate
  modified_base 8: mod_base = OTHER; note = adenosine-3'-phosphate
  modified_base 9: mod_base = OTHER; note = uridine-3'-phosphate
  modified_base 10: mod_base = OTHER; note = adenosine-3'-phosphate
  modified_base 11: mod_base = OTHER; note = uridine-3'-phosphate
  modified_base 12: mod_base = OTHER; note = guanosine-3'-phosphate
  modified_base 13: mod_base = OTHER; note = guanosine-3'-phosphate
  modified_base 14: mod_base = OTHER; note = guanosine-3'-phosphate
  modified_base 15: mod_base = OTHER; note = cytidine-3'-phosphate
  modified_base 16: mod_base = OTHER; note = uridine-3'-phosphate
  modified_base 17: mod_base = OTHER; note = uridine-3'-phosphate
  modified_base 18: mod_base = OTHER; note = uridine-3'-phosphate
  modified_base 19: mod_base = OTHER; note = uridine-3'-phosphate
  misc_feature 1..19: note = RNA
  misc_feature 20..21: note = DNA
tgtcaatatatgggctttttt

SEQ ID NO: 2458 - DNA, 21 bp, synthetic construct
  source 1..21: mol_type = other DNA
  modified_base 1: mod_base = OTHER; note = uridine-3'-phosphate
  modified_base 2: mod_base = OTHER; note = uridine-3'-phosphate
  modified_base 3: mod_base = OTHER; note = guanosine-3'-phosphate
  modified_base 4: mod_base = OTHER; note = uridine-3'-phosphate
  modified_base 5: mod_base = OTHER; note = cytidine-3'-phosphate
  modified_base 6: mod_base = OTHER; note = adenosine-3'-phosphate
  modified_base 7: mod_base = OTHER; note = adenosine-3'-phosphate
  modified_base 8: mod_base = OTHER; note = uridine-3'-phosphate
  modified_base 9: mod_base = OTHER; note = adenosine-3'-phosphate
  modified_base 10: mod_base = OTHER; note = uridine-3'-phosphate
  modified_base 11: mod_base = OTHER; note = adenosine-3'-phosphate
  modified_base 12: mod_base = OTHER; note = uridine-3'-phosphate
  modified_base 13: mod_base = OTHER; note = guanosine-3'-phosphate
  modified_base 14: mod_base = OTHER; note = guanosine-3'-phosphate
  modified_base 15: mod_base = OTHER; note = guanosine-3'-phosphate
  modified_base 16: mod_base = OTHER; note = cytidine-3'-phosphate
  modified_base 17: mod_base = OTHER; note = uridine-3'-phosphate
  modified_base 18: mod_base = OTHER; note = uridine-3'-phosphate
  modified_base 19: mod_base = OTHER; note = uridine-3'-phosphate
  misc_feature 1..19: note = RNA
  misc_feature 20..21: note = DNA
ttgtcaatatatgggcttttt

SEQ ID NO: 2459 - DNA, 21 bp, synthetic construct
  source 1..21: mol_type = other DNA
  modified_base 1: mod_base = OTHER; note = uridine-3'-phosphate
  modified_base 2: mod_base = OTHER; note = uridine-3'-phosphate
  modified_base 3: mod_base = OTHER; note = uridine-3'-phosphate
  modified_base 4: mod_base = OTHER; note = guanosine-3'-phosphate
  modified_base 5: mod_base = OTHER; note = uridine-3'-phosphate
  modified_base 6: mod_base = OTHER; note = cytidine-3'-phosphate
  modified_base 7: mod_base = OTHER; note = adenosine-3'-phosphate
  modified_base 8: mod_base = OTHER; note = adenosine-3'-phosphate
  modified_base 9: mod_base = OTHER; note = uridine-3'-phosphate
  modified_base 10: mod_base = OTHER; note = adenosine-3'-phosphate
  modified_base 11: mod_base = OTHER; note = uridine-3'-phosphate
  modified_base 12: mod_base = OTHER; note = adenosine-3'-phosphate
  modified_base 13: mod_base = OTHER; note = uridine-3'-phosphate
  modified_base 14: mod_base = OTHER; note = guanosine-3'-phosphate
  modified_base 15: mod_base = OTHER; note = guanosine-3'-phosphate
  modified_base 16: mod_base = OTHER; note = guanosine-3'-phosphate
  modified_base 17: mod_base = OTHER; note = cytidine-3'-phosphate
  modified_base 18: mod_base = OTHER; note = uridine-3'-phosphate
  modified_base 19: mod_base = OTHER; note = uridine-3'-phosphate
  misc_feature 1..19: note = RNA
  misc_feature 20..21: note = DNA
tttgtcaatatatgggctttt

SEQ ID NO: 2460 - DNA, 21 bp, synthetic construct
  source 1..21: mol_type = other DNA
  modified_base 1: mod_base = OTHER; note = uridine-3'-phosphate
  modified_base 2: mod_base = OTHER; note = uridine-3'-phosphate
  modified_base 3: mod_base = OTHER; note = uridine-3'-phosphate
  modified_base 4: mod_base = OTHER; note = uridine-3'-phosphate
  modified_base 5: mod_base = OTHER; note = guanosine-3'-phosphate
  modified_base 6: mod_base = OTHER; note = uridine-3'-phosphate
  modified_base 7: mod_base = OTHER; note = cytidine-3'-phosphate
  modified_base 8: mod_base = OTHER; note = adenosine-3'-phosphate
  modified_base 9: mod_base = OTHER; note = adenosine-3'-phosphate
  modified_base 10: mod_base = OTHER; note = uridine-3'-phosphate
  modified_base 11: mod_base = OTHER; note = adenosine-3'-phosphate
  modified_base 12: mod_base = OTHER; note = uridine-3'-phosphate
  modified_base 13: mod_base = OTHER; note = adenosine-3'-phosphate
  modified_base 14: mod_base = OTHER; note = uridine-3'-phosphate
  modified_base 15: mod_base = OTHER; note = guanosine-3'-phosphate
  modified_base 16: mod_base = OTHER; note = guanosine-3'-phosphate
  modified_base 17: mod_base = OTHER; note = guanosine-3'-phosphate
  modified_base 18: mod_base = OTHER; note = cytidine-3'-phosphate
  modified_base 19: mod_base = OTHER; note = uridine-3'-phosphate
  misc_feature 1..19: note = RNA
  misc_feature 20..21: note = DNA
ttttgtcaatatatgggcttt

SEQ ID NO: 2461 - DNA, 21 bp, synthetic construct
  source 1..21: mol_type = other DNA
  modified_base 1: mod_base = OTHER; note = adenosine-3'-phosphate
  modified_base 2: mod_base = OTHER; note = uridine-3'-phosphate
  modified_base 3: mod_base = OTHER; note = uridine-3'-phosphate
  modified_base 4: mod_base = OTHER; note = uridine-3'-phosphate
  modified_base 5: mod_base = OTHER; note = uridine-3'-phosphate
  modified_base 6: mod_base = OTHER; note = guanosine-3'-phosphate
  modified_base 7: mod_base = OTHER; note = uridine-3'-phosphate
  modified_base 8: mod_base = OTHER; note = cytidine-3'-phosphate
  modified_base 9: mod_base = OTHER; note = adenosine-3'-phosphate
  modified_base 10: mod_base = OTHER; note = adenosine-3'-phosphate
  modified_base 11: mod_base = OTHER; note = uridine-3'-phosphate
  modified_base 12: mod_base = OTHER; note = adenosine-3'-phosphate
  modified_base 13: mod_base = OTHER; note = uridine-3'-phosphate
  modified_base 14: mod_base = OTHER; note = adenosine-3'-phosphate
  modified_base 15: mod_base = OTHER; note = uridine-3'-phosphate
  modified_base 16: mod_base = OTHER; note = guanosine-3'-phosphate
  modified_base 17: mod_base = OTHER; note = guanosine-3'-phosphate
  modified_base 18: mod_base = OTHER; note = guanosine-3'-phosphate
  modified_base 19: mod_base = OTHER; note = cytidine-3'-phosphate
  misc_feature 1..19: note = RNA
  misc_feature 20..21: note = DNA
attttgtcaatatatgggctt

SEQ ID NO: 2462 - DNA, 21 bp, synthetic construct
  source 1..21: mol_type = other DNA
  modified_base 1: mod_base = OTHER; note = uridine-3'-phosphate
  modified_base 2: mod_base = OTHER; note = adenosine-3'-phosphate
  modified_base 3: mod_base = OTHER; note = uridine-3'-phosphate
  modified_base 4: mod_base = OTHER; note = uridine-3'-phosphate
  modified_base 5: mod_base = OTHER; note = uridine-3'-phosphate
  modified_base 6: mod_base = OTHER; note = uridine-3'-phosphate
  modified_base 7: mod_base = OTHER; note = guanosine-3'-phosphate
  modified_base 8: mod_base = OTHER; note = uridine-3'-phosphate
  modified_base 9: mod_base = OTHER; note = cytidine-3'-phosphate
  modified_base 10: mod_base = OTHER; note = adenosine-3'-phosphate
  modified_base 11: mod_base = OTHER; note = adenosine-3'-phosphate
  modified_base 12: mod_base = OTHER; note = uridine-3'-phosphate
  modified_base 13: mod_base = OTHER; note = adenosine-3'-phosphate
  modified_base 14: mod_base = OTHER; note = uridine-3'-phosphate
  modified_base 15: mod_base = OTHER; note = adenosine-3'-phosphate
  modified_base 16: mod_base = OTHER; note = uridine-3'-phosphate
  modified_base 17: mod_base = OTHER; note = guanosine-3'-phosphate
  modified_base 18: mod_base = OTHER; note = guanosine-3'-phosphate
  modified_base 19: mod_base = OTHER; note = guanosine-3'-phosphate
  misc_feature 1..19: note = RNA
  misc_feature 20..21: note = DNA
tattttgtcaatatatgggtt

SEQ ID NO: 2463 - DNA, 21 bp, synthetic construct
  source 1..21: mol_type = other DNA
  modified_base 1: mod_base = OTHER; note = uridine-3'-phosphate
  modified_base 2: mod_base = OTHER; note = uridine-3'-phosphate
  modified_base 3: mod_base = OTHER; note = adenosine-3'-phosphate
  modified_base 4: mod_base = OTHER; note = uridine-3'-phosphate
  modified_base 5: mod_base = OTHER; note = uridine-3'-phosphate
  modified_base 6: mod_base = OTHER; note = uridine-3'-phosphate
  modified_base 7: mod_base = OTHER; note = uridine-3'-phosphate
  modified_base 8: mod_base = OTHER; note = guanosine-3'-phosphate
  modified_base 9: mod_base = OTHER; note = uridine-3'-phosphate
  modified_base 10: mod_base = OTHER; note = cytidine-3'-phosphate
  modified_base 11: mod_base = OTHER; note = adenosine-3'-phosphate
  modified_base 12: mod_base = OTHER; note = adenosine-3'-phosphate
  modified_base 13: mod_base = OTHER; note = uridine-3'-phosphate
  modified_base 14: mod_base = OTHER; note = adenosine-3'-phosphate
  modified_base 15: mod_base = OTHER; note = uridine-3'-phosphate
  modified_base 16: mod_base = OTHER; note = adenosine-3'-phosphate
  modified_base 17: mod_base = OTHER; note = uridine-3'-phosphate
  modified_base 18: mod_base = OTHER; note = guanosine-3'-phosphate
  modified_base 19: mod_base = OTHER; note = guanosine-3'-phosphate
  misc_feature 1..19: note = RNA
  misc_feature 20..21: note = DNA
ttattttgtcaatatatggtt

SEQ ID NO: 2464 - DNA, 21 bp, synthetic construct
  source 1..21: mol_type = other DNA
  modified_base 1: mod_base = OTHER; note = guanosine-3'-phosphate
  modified_base 2: mod_base = OTHER; note = uridine-3'-phosphate
  modified_base 3: mod_base = OTHER; note = uridine-3'-phosphate
  modified_base 4: mod_base = OTHER; note = adenosine-3'-phosphate
  modified_base 5: mod_base = OTHER; note = uridine-3'-phosphate
  modified_base 6: mod_base = OTHER; note = uridine-3'-phosphate
  modified_base 7: mod_base = OTHER; note = uridine-3'-phosphate
  modified_base 8: mod_base = OTHER; note = uridine-3'-phosphate
  modified_base 9: mod_base = OTHER; note = guanosine-3'-phosphate
  modified_base 10: mod_base = OTHER; note = uridine-3'-phosphate
  modified_base 11: mod_base = OTHER; note = cytidine-3'-phosphate
  modified_base 12: mod_base = OTHER; note = adenosine-3'-phosphate
  modified_base 13: mod_base = OTHER; note = adenosine-3'-phosphate
  modified_base 14: mod_base = OTHER; note = uridine-3'-phosphate
  modified_base 15: mod_base = OTHER; note = adenosine-3'-phosphate
  modified_base 16: mod_base = OTHER; note = uridine-3'-phosphate
  modified_base 17: mod_base = OTHER; note = adenosine-3'-phosphate
  modified_base 18: mod_base = OTHER; note = uridine-3'-phosphate
  modified_base 19: mod_base = OTHER; note = guanosine-3'-phosphate
  misc_feature 1..19: note = RNA
  misc_feature 20..21: note = DNA
gttattttgtcaatatatgtt

SEQ ID NO: 2465 - DNA, 21 bp, synthetic construct
  source 1..21: mol_type = other DNA
  modified_base 1: mod_base = OTHER; note = adenosine-3'-phosphate
  modified_base 2: mod_base = OTHER; note = guanosine-3'-phosphate
  modified_base 3: mod_base = OTHER; note = uridine-3'-phosphate
  modified_base 4: mod_base = OTHER; note = uridine-3'-phosphate
  modified_base 5: mod_base = OTHER; note = adenosine-3'-phosphate
  modified_base 6: mod_base = OTHER; note = uridine-3'-phosphate
  modified_base 7: mod_base = OTHER; note = uridine-3'-phosphate
  modified_base 8: mod_base = OTHER; note = uridine-3'-phosphate
  modified_base 9: mod_base = OTHER; note = uridine-3'-phosphate
  modified_base 10: mod_base = OTHER; note = guanosine-3'-phosphate
  modified_base 11: mod_base = OTHER; note = uridine-3'-phosphate
  modified_base 12: mod_base = OTHER; note = cytidine-3'-phosphate
  modified_base 13: mod_base = OTHER; note = adenosine-3'-phosphate
  modified_base 14: mod_base = OTHER; note = adenosine-3'-phosphate
  modified_base 15: mod_base = OTHER; note = uridine-3'-phosphate
  modified_base 16: mod_base = OTHER; note = adenosine-3'-phosphate
  modified_base 17: mod_base = OTHER; note = uridine-3'-phosphate
  modified_base 18: mod_base = OTHER; note = adenosine-3'-phosphate
  modified_base 19: mod_base = OTHER; note = uridine-3'-phosphate
  misc_feature 1..19: note = RNA
  misc_feature 20..21: note = DNA
agttattttgtcaatatattt

SEQ ID NO: 2466 - DNA, 21 bp, synthetic construct
  source 1..21: mol_type = other DNA
  modified_base 1: mod_base = OTHER; note = guanosine-3'-phosphate
  modified_base 2: mod_base = OTHER; note = adenosine-3'-phosphate
  modified_base 3: mod_base = OTHER; note = guanosine-3'-phosphate
  modified_base 4: mod_base = OTHER; note = uridine-3'-phosphate
  modified_base 5: mod_base = OTHER; note = uridine-3'-phosphate
  modified_base 6: mod_base = OTHER; note = adenosine-3'-phosphate
  modified_base 7: mod_base = OTHER; note = uridine-3'-phosphate
  modified_base 8: mod_base = OTHER; note = uridine-3'-phosphate
  modified_base 9: mod_base = OTHER; note = uridine-3'-phosphate
  modified_base 10: mod_base = OTHER; note = uridine-3'-phosphate
  modified_base 11: mod_base = OTHER; note = guanosine-3'-phosphate
  modified_base 12: mod_base = OTHER; note = uridine-3'-phosphate
  modified_base 13: mod_base = OTHER; note = cytidine-3'-phosphate
  modified_base 14: mod_base = OTHER; note = adenosine-3'-phosphate
  modified_base 15: mod_base = OTHER; note = adenosine-3'-phosphate
  modified_base 16: mod_base = OTHER; note = uridine-3'-phosphate
  modified_base 17: mod_base = OTHER; note = adenosine-3'-phosphate
  modified_base 18: mod_base = OTHER; note = uridine-3'-phosphate
  modified_base 19: mod_base = OTHER; note = adenosine-3'-phosphate
  misc_feature 1..19: note = RNA
  misc_feature 20..21: note = DNA
gagttattttgtcaatatatt

SEQ ID NO: 2467 - DNA, 21 bp, synthetic construct
  source 1..21: mol_type = other DNA
  modified_base 1: mod_base = OTHER; note = uridine-3'-phosphate
  modified_base 2: mod_base = OTHER; note = guanosine-3'-phosphate
  modified_base 3: mod_base = OTHER; note = adenosine-3'-phosphate
  modified_base 4: mod_base = OTHER; note = guanosine-3'-phosphate
  modified_base 5: mod_base = OTHER; note = uridine-3'-phosphate
  modified_base 6: mod_base = OTHER; note = uridine-3'-phosphate
  modified_base 7: mod_base = OTHER; note = adenosine-3'-phosphate
  modified_base 8: mod_base = OTHER; note = uridine-3'-phosphate
  modified_base 9: mod_base = OTHER; note = uridine-3'-phosphate
  modified_base 10: mod_base = OTHER; note = uridine-3'-phosphate
  modified_base 11: mod_base = OTHER; note = uridine-3'-phosphate
  modified_base 12: mod_base = OTHER; note = guanosine-3'-phosphate
  modified_base 13: mod_base = OTHER; note = uridine-3'-phosphate
  modified_base 14: mod_base = OTHER; note = cytidine-3'-phosphate
  modified_base 15: mod_base = OTHER; note = adenosine-3'-phosphate
  modified_base 16: mod_base = OTHER; note = adenosine-3'-phosphate
  modified_base 17: mod_base = OTHER; note = uridine-3'-phosphate
  modified_base 18: mod_base = OTHER; note = adenosine-3'-phosphate
  modified_base 19: mod_base = OTHER; note = uridine-3'-phosphate
  misc_feature 1..19: note = RNA
  misc_feature 20..21: note = DNA
tgagttattttgtcaatattt

SEQ ID NO: 2468 - DNA, 21 bp, synthetic construct
  source 1..21: mol_type = other DNA
  modified_base 1: mod_base = OTHER; note = guanosine-3'-phosphate
  modified_base 2: mod_base = OTHER; note = uridine-3'-phosphate
  modified_base 3: mod_base = OTHER; note = guanosine-3'-phosphate
  modified_base 4: mod_base = OTHER; note = adenosine-3'-phosphate
  modified_base 5: mod_base = OTHER; note = guanosine-3'-phosphate
  modified_base 6: mod_base = OTHER; note = uridine-3'-phosphate
  modified_base 7: mod_base = OTHER; note = uridine-3'-phosphate
  modified_base 8: mod_base = OTHER; note = adenosine-3'-phosphate
  modified_base 9: mod_base = OTHER; note = uridine-3'-phosphate
  modified_base 10: mod_base = OTHER; note = uridine-3'-phosphate
  modified_base 11: mod_base = OTHER; note = uridine-3'-phosphate
  modified_base 12: mod_base = OTHER; note = uridine-3'-phosphate
  modified_base 13: mod_base = OTHER; note = guanosine-3'-phosphate
  modified_base 14: mod_base = OTHER; note = uridine-3'-phosphate
  modified_base 15: mod_base = OTHER; note = cytidine-3'-phosphate
  modified_base 16: mod_base = OTHER; note = adenosine-3'-phosphate
  modified_base 17: mod_base = OTHER; note = adenosine-3'-phosphate
  modified_base 18: mod_base = OTHER; note = uridine-3'-phosphate
  modified_base 19: mod_base = OTHER; note = adenosine-3'-phosphate
  misc_feature 1..19: note = RNA
  misc_feature 20..21: note = DNA
gtgagttattttgtcaatatt

SEQ ID NO: 2469 - DNA, 21 bp, synthetic construct
  source 1..21: mol_type = other DNA
  modified_base 1: mod_base = OTHER; note = adenosine-3'-phosphate
  modified_base 2: mod_base = OTHER; note = guanosine-3'-phosphate
  modified_base 3: mod_base = OTHER; note = uridine-3'-phosphate
  modified_base 4: mod_base = OTHER; note = guanosine-3'-phosphate
  modified_base 5: mod_base = OTHER; note = adenosine-3'-phosphate
  modified_base 6: mod_base = OTHER; note = guanosine-3'-phosphate
  modified_base 7: mod_base = OTHER; note = uridine-3'-phosphate
  modified_base 8: mod_base = OTHER; note = uridine-3'-phosphate
  modified_base 9: mod_base = OTHER; note = adenosine-3'-phosphate
  modified_base 10: mod_base = OTHER; note = uridine-3'-phosphate
  modified_base 11: mod_base = OTHER; note = uridine-3'-phosphate
  modified_base 12: mod_base = OTHER; note = uridine-3'-phosphate
  modified_base 13: mod_base = OTHER; note = uridine-3'-phosphate
  modified_base 14: mod_base = OTHER; note = guanosine-3'-phosphate
  modified_base 15: mod_base = OTHER; note = uridine-3'-phosphate
  modified_base 16: mod_base = OTHER; note = cytidine-3'-phosphate
  modified_base 17: mod_base = OTHER; note = adenosine-3'-phosphate
  modified_base 18: mod_base = OTHER; note = adenosine-3'-phosphate
  modified_base 19: mod_base = OTHER; note = uridine-3'-phosphate
  misc_feature 1..19: note = RNA
  misc_feature 20..21: note = DNA
agtgagttattttgtcaattt

SEQ ID NO: 2470 - DNA, 21 bp, synthetic construct
  source 1..21: mol_type = other DNA
  modified_base 1: mod_base = OTHER; note = uridine-3'-phosphate
  modified_base 2: mod_base = OTHER; note = adenosine-3'-phosphate
  modified_base 3: mod_base = OTHER; note = guanosine-3'-phosphate
  modified_base 4: mod_base = OTHER; note = uridine-3'-phosphate
  modified_base 5: mod_base = OTHER; note = guanosine-3'-phosphate
  modified_base 6: mod_base = OTHER; note = adenosine-3'-phosphate
  modified_base 7: mod_base = OTHER; note = guanosine-3'-phosphate
  modified_base 8: mod_base = OTHER; note = uridine-3'-phosphate
  modified_base 9: mod_base = OTHER; note = uridine-3'-phosphate
  modified_base 10: mod_base = OTHER; note = adenosine-3'-phosphate
  modified_base 11: mod_base = OTHER; note = uridine-3'-phosphate
  modified_base 12: mod_base = OTHER; note = uridine-3'-phosphate
  modified_base 13: mod_base = OTHER; note = uridine-3'-phosphate
  modified_base 14: mod_base = OTHER; note = uridine-3'-phosphate
  modified_base 15: mod_base = OTHER; note = guanosine-3'-phosphate
  modified_base 16: mod_base = OTHER; note = uridine-3'-phosphate
  modified_base 17: mod_base = OTHER; note = cytidine-3'-phosphate
  modified_base 18: mod_base = OTHER; note = adenosine-3'-phosphate
  modified_base 19: mod_base = OTHER; note = adenosine-3'-phosphate
  misc_feature 1..19: note = RNA
  misc_feature 20..21: note = DNA
tagtgagttattttgtcaatt

SEQ ID NO: 2471 - DNA, 21 bp, synthetic construct
  source 1..21: mol_type = other DNA
  modified_base 1: mod_base = OTHER; note = adenosine-3'-phosphate
  modified_base 2: mod_base = OTHER; note = uridine-3'-phosphate
  modified_base 3: mod_base = OTHER; note = adenosine-3'-phosphate
  modified_base 4: mod_base = OTHER; note = guanosine-3'-phosphate
  modified_base 5: mod_base = OTHER; note = uridine-3'-phosphate
  modified_base 6: mod_base = OTHER; note = guanosine-3'-phosphate
  modified_base 7: mod_base = OTHER; note = adenosine-3'-phosphate
  modified_base 8: mod_base = OTHER; note = guanosine-3'-phosphate
  modified_base 9: mod_base = OTHER; note = uridine-3'-phosphate
  modified_base 10: mod_base = OTHER; note = uridine-3'-phosphate
  modified_base 11: mod_base = OTHER; note = adenosine-3'-phosphate
  modified_base 12: mod_base = OTHER; note = uridine-3'-phosphate
  modified_base 13: mod_base = OTHER; note = uridine-3'-phosphate
  modified_base 14: mod_base = OTHER; note = uridine-3'-phosphate
  modified_base 15: mod_base = OTHER; note = uridine-3'-phosphate
  modified_base 16: mod_base = OTHER; note = guanosine-3'-phosphate
  modified_base 17: mod_base = OTHER; note = uridine-3'-phosphate
  modified_base 18: mod_base = OTHER; note = cytidine-3'-phosphate
  modified_base 19: mod_base = OTHER; note = adenosine-3'-phosphate
  misc_feature 1..19: note = RNA
  misc_feature 20..21: note = DNA
atagtgagttattttgtcatt

SEQ ID NO: 2472 - DNA, 21 bp, synthetic construct
  source 1..21: mol_type = other DNA
  modified_base 1: mod_base = OTHER; note = uridine-3'-phosphate
  modified_base 2: mod_base = OTHER; note = adenosine-3'-phosphate
  modified_base 3: mod_base = OTHER; note = uridine-3'-phosphate
  modified_base 4: mod_base = OTHER; note = adenosine-3'-phosphate
  modified_base 5: mod_base = OTHER; note = guanosine-3'-phosphate
  modified_base 6: mod_base = OTHER; note = uridine-3'-phosphate
  modified_base 7: mod_base = OTHER; note = guanosine-3'-phosphate
  modified_base 8: mod_base = OTHER; note = adenosine-3'-phosphate
  modified_base 9: mod_base = OTHER; note = guanosine-3'-phosphate
  modified_base 10: mod_base = OTHER; note = uridine-3'-phosphate
  modified_base 11: mod_base = OTHER; note = uridine-3'-phosphate
  modified_base 12: mod_base = OTHER; note = adenosine-3'-phosphate
  modified_base 13: mod_base = OTHER; note = uridine-3'-phosphate
  modified_base 14: mod_base = OTHER; note = uridine-3'-phosphate
  modified_base 15: mod_base = OTHER; note = uridine-3'-phosphate
  modified_base 16: mod_base = OTHER; note = uridine-3'-phosphate
  modified_base 17: mod_base = OTHER; note = guanosine-3'-phosphate
  modified_base 18: mod_base = OTHER; note = uridine-3'-phosphate
  modified_base 19: mod_base = OTHER; note = cytidine-3'-phosphate
  misc_feature 1..19: note = RNA
  misc_feature 20..21: note = DNA
tatagtgagttattttgtctt

SEQ ID NO: 2473 - DNA, 21 bp, synthetic construct
  source 1..21: mol_type = other DNA
  modified_base 1: mod_base = OTHER; note = adenosine-3'-phosphate
  modified_base 2: mod_base = OTHER; note = adenosine-3'-phosphate
  modified_base 3: mod_base = OTHER; note = uridine-3'-phosphate
  modified_base 4: mod_base = OTHER; note = uridine-3'-phosphate
  modified_base 5: mod_base = OTHER; note = adenosine-3'-phosphate
  modified_base 6: mod_base = OTHER; note = uridine-3'-phosphate
  modified_base 7: mod_base = OTHER; note = adenosine-3'-phosphate
  modified_base 8: mod_base = OTHER; note = guanosine-3'-phosphate
  modified_base 9: mod_base = OTHER; note = uridine-3'-phosphate
  modified_base 10: mod_base = OTHER; note = guanosine-3'-phosphate
  modified_base 11: mod_base = OTHER; note = adenosine-3'-phosphate
  modified_base 12: mod_base = OTHER; note = guanosine-3'-phosphate
  modified_base 13: mod_base = OTHER; note = uridine-3'-phosphate
  modified_base 14: mod_base = OTHER; note = uridine-3'-phosphate
  modified_base 15: mod_base = OTHER; note = adenosine-3'-phosphate
  modified_base 16: mod_base = OTHER; note = uridine-3'-phosphate
  modified_base 17: mod_base = OTHER; note = uridine-3'-phosphate
  modified_base 18: mod_base = OTHER; note = uridine-3'-phosphate
  modified_base 19: mod_base = OTHER; note = uridine-3'-phosphate
  misc_feature 1..19: note = RNA
  misc_feature 20..21: note = DNA
aattatagtgagttatttttt

SEQ ID NO: 2474 - DNA, 21 bp, synthetic construct
  source 1..21: mol_type = other DNA
  modified_base 1: mod_base = OTHER; note = uridine-3'-phosphate
  modified_base 2: mod_base = OTHER; note = adenosine-3'-phosphate
  modified_base 3: mod_base = OTHER; note = adenosine-3'-phosphate
  modified_base 4: mod_base = OTHER; note = uridine-3'-phosphate
  modified_base 5: mod_base = OTHER; note = uridine-3'-phosphate
  modified_base 6: mod_base = OTHER; note = adenosine-3'-phosphate
  modified_base 7: mod_base = OTHER; note = uridine-3'-phosphate
  modified_base 8: mod_base = OTHER; note = adenosine-3'-phosphate
  modified_base 9: mod_base = OTHER; note = guanosine-3'-phosphate
  modified_base 10: mod_base = OTHER; note = uridine-3'-phosphate
  modified_base 11: mod_base = OTHER; note = guanosine-3'-phosphate
  modified_base 12: mod_base = OTHER; note = adenosine-3'-phosphate
  modified_base 13: mod_base = OTHER; note = guanosine-3'-phosphate
  modified_base 14: mod_base = OTHER; note = uridine-3'-phosphate
  modified_base 15: mod_base = OTHER; note = uridine-3'-phosphate
  modified_base 16: mod_base = OTHER; note = adenosine-3'-phosphate
  modified_base 17: mod_base = OTHER; note = uridine-3'-phosphate
  modified_base 18: mod_base = OTHER; note = uridine-3'-phosphate
  modified_base 19: mod_base = OTHER; note = uridine-3'-phosphate
  misc_feature 1..19: note = RNA
  misc_feature 20..21: note = DNA
taattatagtgagttattttt

SEQ ID NO: 2475 - DNA, 21 bp, synthetic construct
  source 1..21: mol_type = other DNA
  modified_base 1: mod_base = OTHER; note = guanosine-3'-phosphate
  modified_base 2: mod_base = OTHER; note = uridine-3'-phosphate
  modified_base 3: mod_base = OTHER; note = adenosine-3'-phosphate
  modified_base 4: mod_base = OTHER; note = adenosine-3'-phosphate
  modified_base 5: mod_base = OTHER; note = uridine-3'-phosphate
  modified_base 6: mod_base = OTHER; note = uridine-3'-phosphate
  modified_base 7: mod_base = OTHER; note = adenosine-3'-phosphate
  modified_base 8: mod_base = OTHER; note = uridine-3'-phosphate
  modified_base 9: mod_base = OTHER; note = adenosine-3'-phosphate
  modified_base 10: mod_base = OTHER; note = guanosine-3'-phosphate
  modified_base 11: mod_base = OTHER; note = uridine-3'-phosphate
  modified_base 12: mod_base = OTHER; note = guanosine-3'-phosphate
  modified_base 13: mod_base = OTHER; note = adenosine-3'-phosphate
  modified_base 14: mod_base = OTHER; note = guanosine-3'-phosphate
  modified_base 15: mod_base = OTHER; note = uridine-3'-phosphate
  modified_base 16: mod_base = OTHER; note = uridine-3'-phosphate
  modified_base 17: mod_base = OTHER; note = adenosine-3'-phosphate
  modified_base 18: mod_base = OTHER; note = uridine-3'-phosphate
  modified_base 19: mod_base = OTHER; note = uridine-3'-phosphate
  misc_feature 1..19: note = RNA
  misc_feature 20..21: note = DNA
gtaattatagtgagttatttt

SEQ ID NO: 2476 - DNA, 21 bp, synthetic construct
  source 1..21: mol_type = other DNA
  modified_base 1: mod_base = OTHER; note = adenosine-3'-phosphate
  modified_base 2: mod_base = OTHER; note = guanosine-3'-phosphate
  modified_base 3: mod_base = OTHER; note = uridine-3'-phosphate
  modified_base 4: mod_base = OTHER; note = adenosine-3'-phosphate
  modified_base 5: mod_base = OTHER; note = adenosine-3'-phosphate
  modified_base 6: mod_base = OTHER; note = uridine-3'-phosphate
  modified_base 7: mod_base = OTHER; note = uridine-3'-phosphate
  modified_base 8: mod_base = OTHER; note = adenosine-3'-phosphate
  modified_base 9: mod_base = OTHER; note = uridine-3'-phosphate
  modified_base 10: mod_base = OTHER; note = adenosine-3'-phosphate
  modified_base 11: mod_base = OTHER; note = guanosine-3'-phosphate
  modified_base 12: mod_base = OTHER; note = uridine-3'-phosphate
  modified_base 13: mod_base = OTHER; note = guanosine-3'-phosphate
  modified_base 14: mod_base = OTHER; note = adenosine-3'-phosphate
  modified_base 15: mod_base = OTHER; note = guanosine-3'-phosphate
  modified_base 16: mod_base = OTHER; note = uridine-3'-phosphate
  modified_base 17: mod_base = OTHER; note = uridine-3'-phosphate
  modified_base 18: mod_base = OTHER; note = adenosine-3'-phosphate
  modified_base 19: mod_base = OTHER; note = uridine-3'-phosphate
  misc_feature 1..19: note = RNA
  misc_feature 20..21: note = DNA
agtaattatagtgagttattt

SEQ ID NO: 2477 - DNA, 21 bp, synthetic construct
  source 1..21: mol_type = other DNA
  modified_base 1: mod_base = OTHER; note = cytidine-3'-phosphate
  modified_base 2: mod_base = OTHER; note = adenosine-3'-phosphate
  modified_base 3: mod_base = OTHER; note = adenosine-3'-phosphate
  modified_base 4: mod_base = OTHER; note = guanosine-3'-phosphate
  modified_base 5: mod_base = OTHER; note = uridine-3'-phosphate
  modified_base 6: mod_base = OTHER; note = adenosine-3'-phosphate
  modified_base 7: mod_base = OTHER; note = adenosine-3'-phosphate
  modified_base 8: mod_base = OTHER; note = uridine-3'-phosphate
  modified_base 9: mod_base = OTHER; note = uridine-3'-phosphate
  modified_base 10: mod_base = OTHER; note = adenosine-3'-phosphate
  modified_base 11: mod_base = OTHER; note = uridine-3'-phosphate
  modified_base 12: mod_base = OTHER; note = adenosine-3'-phosphate
  modified_base 13: mod_base = OTHER; note = guanosine-3'-phosphate
  modified_base 14: mod_base = OTHER; note = uridine-3'-phosphate
  modified_base 15: mod_base = OTHER; note = guanosine-3'-phosphate
  modified_base 16: mod_base = OTHER; note = adenosine-3'-phosphate
  modified_base 17: mod_base = OTHER; note = guanosine-3'-phosphate
  modified_base 18: mod_base = OTHER; note = uridine-3'-phosphate
  modified_base 19: mod_base = OTHER; note = uridine-3'-phosphate
  misc_feature 1..19: note = RNA
  misc_feature 20..21: note = DNA
caagtaattatagtgagtttt

SEQ ID NO: 2478 - DNA, 21 bp, synthetic construct
  source 1..21: mol_type = other DNA
  modified_base 1: mod_base = OTHER; note = uridine-3'-phosphate
  modified_base 2: mod_base = OTHER; note = cytidine-3'-phosphate
  modified_base 3: mod_base = OTHER; note = adenosine-3'-phosphate
  modified_base 4: mod_base = OTHER; note = adenosine-3'-phosphate
  modified_base 5: mod_base = OTHER; note = guanosine-3'-phosphate
  modified_base 6: mod_base = OTHER; note = uridine-3'-phosphate
  modified_base 7: mod_base = OTHER; note = adenosine-3'-phosphate
  modified_base 8: mod_base = OTHER; note = adenosine-3'-phosphate
  modified_base 9: mod_base = OTHER; note = uridine-3'-phosphate
  modified_base 10: mod_base = OTHER; note = uridine-3'-phosphate
  modified_base 11: mod_base = OTHER; note = adenosine-3'-phosphate
  modified_base 12: mod_base = OTHER; note = uridine-3'-phosphate
  modified_base 13: mod_base = OTHER; note = adenosine-3'-phosphate
  modified_base 14: mod_base = OTHER; note = guanosine-3'-phosphate
  modified_base 15: mod_base = OTHER; note = uridine-3'-phosphate
  modified_base 16: mod_base = OTHER; note = guanosine-3'-phosphate
  modified_base 17: mod_base = OTHER; note = adenosine-3'-phosphate
  modified_base 18: mod_base = OTHER; note = guanosine-3'-phosphate
  modified_base 19: mod_base = OTHER; note = uridine-3'-phosphate
  misc_feature 1..19: note = RNA
  misc_feature 20..21: note = DNA
tcaagtaattatagtgagttt

SEQ ID NO: 2479 - DNA, 21 bp, synthetic construct
  source 1..21: mol_type = other DNA
  modified_base 1: mod_base = OTHER; note = adenosine-3'-phosphate
  modified_base 2: mod_base = OTHER; note = uridine-3'-phosphate
  modified_base 3: mod_base = OTHER; note = cytidine-3'-phosphate
  modified_base 4: mod_base = OTHER; note = adenosine-3'-phosphate
  modified_base 5: mod_base = OTHER; note = adenosine-3'-phosphate
  modified_base 6: mod_base = OTHER; note = guanosine-3'-phosphate
  modified_base 7: mod_base = OTHER; note = uridine-3'-phosphate
  modified_base 8: mod_base = OTHER; note = adenosine-3'-phosphate
  modified_base 9: mod_base = OTHER; note = adenosine-3'-phosphate
  modified_base 10: mod_base = OTHER; note = uridine-3'-phosphate
  modified_base 11: mod_base = OTHER; note = uridine-3'-phosphate
  modified_base 12: mod_base = OTHER; note = adenosine-3'-phosphate
  modified_base 13: mod_base = OTHER; note = uridine-3'-phosphate
  modified_base 14: mod_base = OTHER; note = adenosine-3'-phosphate
  modified_base 15: mod_base = OTHER; note = guanosine-3'-phosphate
  modified_base 16: mod_base = OTHER; note = uridine-3'-phosphate
  modified_base 17: mod_base = OTHER; note = guanosine-3'-phosphate
  modified_base 18: mod_base = OTHER; note = adenosine-3'-phosphate
  modified_base 19: mod_base = OTHER; note = guanosine-3'-phosphate
  misc_feature 1..19: note = RNA
  misc_feature 20..21: note = DNA
atcaagtaattatagtgagtt

SEQ ID NO: 2480 - DNA, 21 bp, synthetic construct
  source 1..21: mol_type = other DNA
  modified_base 1: mod_base = OTHER; note = adenosine-3'-phosphate
  modified_base 2: mod_base = OTHER; note = adenosine-3'-phosphate
  modified_base 3: mod_base = OTHER; note = uridine-3'-phosphate
  modified_base 4: mod_base = OTHER; note = cytidine-3'-phosphate
  modified_base 5: mod_base = OTHER; note = adenosine-3'-phosphate
  modified_base 6: mod_base = OTHER; note = adenosine-3'-phosphate
  modified_base 7: mod_base = OTHER; note = guanosine-3'-phosphate
  modified_base 8: mod_base = OTHER; note = uridine-3'-phosphate
  modified_base 9: mod_base = OTHER; note = adenosine-3'-phosphate
  modified_base 10: mod_base = OTHER; note = adenosine-3'-phosphate
  modified_base 11: mod_base = OTHER; note = uridine-3'-phosphate
  modified_base 12: mod_base = OTHER; note = uridine-3'-phosphate
  modified_base 13: mod_base = OTHER; note = adenosine-3'-phosphate
  modified_base 14: mod_base = OTHER; note = uridine-3'-phosphate
  modified_base 15: mod_base = OTHER; note = adenosine-3'-phosphate
  modified_base 16: mod_base = OTHER; note = guanosine-3'-phosphate
  modified_base 17: mod_base = OTHER; note = uridine-3'-phosphate
  modified_base 18: mod_base = OTHER; note = guanosine-3'-phosphate
  modified_base 19: mod_base = OTHER; note = adenosine-3'-phosphate
  misc_feature 1..19: note = RNA
  misc_feature 20..21: note = DNA
aatcaagtaattatagtgatt

SEQ ID NO: 2481 - DNA, 21 bp, synthetic construct
  source 1..21: mol_type = other DNA
  modified_base 1: mod_base = OTHER; note = adenosine-3'-phosphate
  modified_base 2: mod_base = OTHER; note = adenosine-3'-phosphate
  modified_base 3: mod_base = OTHER; note = adenosine-3'-phosphate
  modified_base 4: mod_base = OTHER; note = adenosine-3'-phosphate
  modified_base 5: mod_base = OTHER; note = uridine-3'-phosphate
  modified_base 6: mod_base = OTHER; note = cytidine-3'-phosphate
  modified_base 7: mod_base = OTHER; note = adenosine-3'-phosphate
  modified_base 8: mod_base = OTHER; note = adenosine-3'-phosphate
  modified_base 9: mod_base = OTHER; note = guanosine-3'-phosphate
  modified_base 10: mod_base = OTHER; note = uridine-3'-phosphate
  modified_base 11: mod_base = OTHER; note = adenosine-3'-phosphate
  modified_base 12: mod_base = OTHER; note = adenosine-3'-phosphate
  modified_base 13: mod_base = OTHER; note = uridine-3'-phosphate
  modified_base 14: mod_base = OTHER; note = uridine-3'-phosphate
  modified_base 15: mod_base = OTHER; note = adenosine-3'-phosphate
  modified_base 16: mod_base = OTHER; note = uridine-3'-phosphate
  modified_base 17: mod_base = OTHER; note = adenosine-3'-phosphate
  modified_base 18: mod_base = OTHER; note = guanosine-3'-phosphate
  modified_base 19: mod_base = OTHER; note = uridine-3'-phosphate
  misc_feature 1..19: note = RNA
  misc_feature 20..21: note = DNA
aaaatcaagtaattatagttt

SEQ ID NO: 2482 - DNA, 21 bp, synthetic construct
  source 1..21: mol_type = other DNA
  modified_base 1: mod_base = OTHER; note = uridine-3'-phosphate
  modified_base 2: mod_base = OTHER; note = adenosine-3'-phosphate
  modified_base 3: mod_base = OTHER; note = adenosine-3'-phosphate
  modified_base 4: mod_base = OTHER; note = adenosine-3'-phosphate
  modified_base 5: mod_base = OTHER; note = adenosine-3'-phosphate
  modified_base 6: mod_base = OTHER; note = uridine-3'-phosphate
  modified_base 7: mod_base = OTHER; note = cytidine-3'-phosphate
  modified_base 8: mod_base = OTHER; note = adenosine-3'-phosphate
  modified_base 9: mod_base = OTHER; note = adenosine-3'-phosphate
  modified_base 10: mod_base = OTHER; note = guanosine-3'-phosphate
  modified_base 11: mod_base = OTHER; note = uridine-3'-phosphate
  modified_base 12: mod_base = OTHER; note = adenosine-3'-phosphate
  modified_base 13: mod_base = OTHER; note = adenosine-3'-phosphate
  modified_base 14: mod_base = OTHER; note = uridine-3'-phosphate
  modified_base 15: mod_base = OTHER; note = uridine-3'-phosphate
  modified_base 16: mod_base = OTHER; note = adenosine-3'-phosphate
  modified_base 17: mod_base = OTHER; note = uridine-3'-phosphate
  modified_base 18: mod_base = OTHER; note = adenosine-3'-phosphate
  modified_base 19: mod_base = OTHER; note = guanosine-3'-phosphate
  misc_feature 1..19: note = RNA
  misc_feature 20..21: note = DNA
taaaatcaagtaattatagtt

SEQ ID NO: 2483 - DNA, 21 bp, synthetic construct
  source 1..21: mol_type = other DNA
  modified_base 1: mod_base = OTHER; note = adenosine-3'-phosphate
  modified_base 2: mod_base = OTHER; note = uridine-3'-phosphate
  modified_base 3: mod_base = OTHER; note = adenosine-3'-phosphate
  modified_base 4: mod_base = OTHER; note = adenosine-3'-phosphate
  modified_base 5: mod_base = OTHER; note = adenosine-3'-phosphate
  modified_base 6: mod_base = OTHER; note = adenosine-3'-phosphate
  modified_base 7: mod_base = OTHER; note = uridine-3'-phosphate
  modified_base 8: mod_base = OTHER; note = cytidine-3'-phosphate
  modified_base 9: mod_base = OTHER; note = adenosine-3'-phosphate
  modified_base 10: mod_base = OTHER; note = adenosine-3'-phosphate
  modified_base 11: mod_base = OTHER; note = guanosine-3'-phosphate
  modified_base 12: mod_base = OTHER; note = uridine-3'-phosphate
  modified_base 13: mod_base = OTHER; note = adenosine-3'-phosphate
  modified_base 14: mod_base = OTHER; note = adenosine-3'-phosphate
  modified_base 15: mod_base = OTHER; note = uridine-3'-phosphate
  modified_base 16: mod_base = OTHER; note = uridine-3'-phosphate
  modified_base 17: mod_base = OTHER; note = adenosine-3'-phosphate
  modified_base 18: mod_base = OTHER; note = uridine-3'-phosphate
  modified_base 19: mod_base = OTHER; note = adenosine-3'-phosphate
  misc_feature 1..19: note = RNA
  misc_feature 20..21: note = DNA
ataaaatcaagtaattatatt

SEQ ID NO: 2484 - DNA, 21 bp, synthetic construct
  source 1..21: mol_type = other DNA
  modified_base 1: mod_base = OTHER; note = guanosine-3'-phosphate
  modified_base 2: mod_base = OTHER; note = adenosine-3'-phosphate
  modified_base 3: mod_base = OTHER; note = uridine-3'-phosphate
  modified_base 4: mod_base = OTHER; note = adenosine-3'-phosphate
  modified_base 5: mod_base = OTHER; note = adenosine-3'-phosphate
  modified_base 6: mod_base = OTHER; note = adenosine-3'-phosphate
  modified_base 7: mod_base = OTHER; note = adenosine-3'-phosphate
  modified_base 8: mod_base = OTHER; note = uridine-3'-phosphate
  modified_base 9: mod_base = OTHER; note = cytidine-3'-phosphate
  modified_base 10: mod_base = OTHER; note = adenosine-3'-phosphate
  modified_base 11: mod_base = OTHER; note = adenosine-3'-phosphate
  modified_base 12: mod_base = OTHER; note = guanosine-3'-phosphate
  modified_base 13: mod_base = OTHER; note = uridine-3'-phosphate
  modified_base 14: mod_base = OTHER; note = adenosine-3'-phosphate
  modified_base 15: mod_base = OTHER; note = adenosine-3'-phosphate
  modified_base 16: mod_base = OTHER; note = uridine-3'-phosphate
  modified_base 17: mod_base = OTHER; note = uridine-3'-phosphate
  modified_base 18: mod_base = OTHER; note = adenosine-3'-phosphate
  modified_base 19: mod_base = OTHER; note = uridine-3'-phosphate
  misc_feature 1..19: note = RNA
  misc_feature 20..21: note = DNA
gataaaatcaagtaattattt

SEQ ID NO: 2485 - DNA, 21 bp, synthetic construct
  source 1..21: mol_type = other DNA
  modified_base 1: mod_base = OTHER; note = guanosine-3'-phosphate
  modified_base 2: mod_base = OTHER; note = guanosine-3'-phosphate
  modified_base 3: mod_base = OTHER; note = adenosine-3'-phosphate
  modified_base 4: mod_base = OTHER; note = uridine-3'-phosphate
  modified_base 5: mod_base = OTHER; note = adenosine-3'-phosphate
  modified_base 6: mod_base = OTHER; note = adenosine-3'-phosphate
  modified_base 7: mod_base = OTHER; note = adenosine-3'-phosphate
  modified_base 8: mod_base = OTHER; note = adenosine-3'-phosphate
  modified_base 9: mod_base = OTHER; note = uridine-3'-phosphate
  modified_base 10: mod_base = OTHER; note = cytidine-3'-phosphate
  modified_base 11: mod_base = OTHER; note = adenosine-3'-phosphate
  modified_base 12: mod_base = OTHER; note = adenosine-3'-phosphate
  modified_base 13: mod_base = OTHER; note = guanosine-3'-phosphate
  modified_base 14: mod_base = OTHER; note = uridine-3'-phosphate
  modified_base 15: mod_base = OTHER; note = adenosine-3'-phosphate
  modified_base 16: mod_base = OTHER; note = adenosine-3'-phosphate
  modified_base 17: mod_base = OTHER; note = uridine-3'-phosphate
  modified_base 18: mod_base = OTHER; note = uridine-3'-phosphate
  modified_base 19: mod_base = OTHER; note = adenosine-3'-phosphate
  misc_feature 1..19: note = RNA
  misc_feature 20..21: note = DNA
ggataaaatcaagtaattatt

SEQ ID NO: 2486 - DNA, 21 bp, synthetic construct
  source 1..21: mol_type = other DNA
  modified_base 1: mod_base = OTHER; note = uridine-3'-phosphate
  modified_base 2: mod_base = OTHER; note = guanosine-3'-phosphate
  modified_base 3: mod_base = OTHER; note = guanosine-3'-phosphate
  modified_base 4: mod_base = OTHER; note = adenosine-3'-phosphate
  modified_base 5: mod_base = OTHER; note = uridine-3'-phosphate
  modified_base 6: mod_base = OTHER; note = adenosine-3'-phosphate
  modified_base 7: mod_base = OTHER; note = adenosine-3'-phosphate
  modified_base 8: mod_base = OTHER; note = adenosine-3'-phosphate
  modified_base 9: mod_base = OTHER; note = adenosine-3'-phosphate
  modified_base 10: mod_base = OTHER; note = uridine-3'-phosphate
  modified_base 11: mod_base = OTHER; note = cytidine-3'-phosphate
  modified_base 12: mod_base = OTHER; note = adenosine-3'-phosphate
  modified_base 13: mod_base = OTHER; note = adenosine-3'-phosphate
  modified_base 14: mod_base = OTHER; note = guanosine-3'-phosphate
  modified_base 15: mod_base = OTHER; note = uridine-3'-phosphate
  modified_base 16: mod_base = OTHER; note = adenosine-3'-phosphate
  modified_base 17: mod_base = OTHER; note = adenosine-3'-phosphate
  modified_base 18: mod_base = OTHER; note = uridine-3'-phosphate
  modified_base 19: mod_base = OTHER; note = uridine-3'-phosphate
  misc_feature 1..19: note = RNA
  misc_feature 20..21: note = DNA
tggataaaatcaagtaatttt

SEQ ID NO: 2487 - DNA, 21 bp, synthetic construct
  source 1..21: mol_type = other DNA
  modified_base 1: mod_base = OTHER; note = uridine-3'-phosphate
  modified_base 2: mod_base = OTHER; note = uridine-3'-phosphate
  modified_base 3: mod_base = OTHER; note = guanosine-3'-phosphate
  modified_base 4: mod_base = OTHER; note = guanosine-3'-phosphate
  modified_base 5: mod_base = OTHER; note = adenosine-3'-phosphate
  modified_base 6: mod_base = OTHER; note = uridine-3'-phosphate
  modified_base 7: mod_base = OTHER; note = adenosine-3'-phosphate
  modified_base 8: mod_base = OTHER; note = adenosine-3'-phosphate
  modified_base 9: mod_base = OTHER; note = adenosine-3'-phosphate
  modified_base 10: mod_base = OTHER; note = adenosine-3'-phosphate
  modified_base 11: mod_base = OTHER; note = uridine-3'-phosphate
  modified_base 12: mod_base = OTHER; note = cytidine-3'-phosphate
  modified_base 13: mod_base = OTHER; note = adenosine-3'-phosphate
  modified_base 14: mod_base = OTHER; note = adenosine-3'-phosphate
  modified_base 15: mod_base = OTHER; note = guanosine-3'-phosphate
  modified_base 16: mod_base = OTHER; note = uridine-3'-phosphate
  modified_base 17: mod_base = OTHER; note = adenosine-3'-phosphate
  modified_base 18: mod_base = OTHER; note = adenosine-3'-phosphate
  modified_base 19: mod_base = OTHER; note = uridine-3'-phosphate
  misc_feature 1..19: note = RNA
  misc_feature 20..21: note = DNA
ttggataaaatcaagtaattt

SEQ ID NO: 2488 - DNA, 21 bp, synthetic construct
  source 1..21: mol_type = other DNA
  modified_base 1: mod_base = OTHER; note = uridine-3'-phosphate
  modified_base 2: mod_base = OTHER; note = adenosine-3'-phosphate
  modified_base 3: mod_base = OTHER; note = adenosine-3'-phosphate
  modified_base 4: mod_base = OTHER; note = uridine-3'-phosphate
  modified_base 5: mod_base = OTHER; note = uridine-3'-phosphate
  modified_base 6: mod_base = OTHER; note = uridine-3'-phosphate
  modified_base 7: mod_base = OTHER; note = uridine-3'-phosphate
  modified_base 8: mod_base = OTHER; note = guanosine-3'-phosphate
  modified_base 9: mod_base = OTHER; note = cytidine-3'-phosphate
  modified_base 10: mod_base = OTHER; note = cytidine-3'-phosphate
  modified_base 11: mod_base = OTHER; note = cytidine-3'-phosphate
  modified_base 12: mod_base = OTHER; note = uridine-3'-phosphate
  modified_base 13: mod_base = OTHER; note = uridine-3'-phosphate
  modified_base 14: mod_base = OTHER; note = guanosine-3'-phosphate
  modified_base 15: mod_base = OTHER; note = guanosine-3'-phosphate
  modified_base 16: mod_base = OTHER; note = adenosine-3'-phosphate
  modified_base 17: mod_base = OTHER; note = uridine-3'-phosphate
  modified_base 18: mod_base = OTHER; note = adenosine-3'-phosphate
  modified_base 19: mod_base = OTHER; note = adenosine-3'-phosphate
  misc_feature 1..19: note = RNA
  misc_feature 20..21: note = DNA
taattttgcccttggataatt

SEQ ID NO: 2489 - DNA, 21 bp, synthetic construct
  source 1..21: mol_type = other DNA
  modified_base 1: mod_base = OTHER; note = cytidine-3'-phosphate
  modified_base 2: mod_base = OTHER; note = cytidine-3'-phosphate
  modified_base 3: mod_base = OTHER; note = adenosine-3'-phosphate
  modified_base 4: mod_base = OTHER; note = adenosine-3'-phosphate
  modified_base 5: mod_base = OTHER; note = adenosine-3'-phosphate
  modified_base 6: mod_base = OTHER; note = guanosine-3'-phosphate
  modified_base 7: mod_base = OTHER; note = uridine-3'-phosphate
  modified_base 8: mod_base = OTHER; note = guanosine-3'-phosphate
  modified_base 9: mod_base = OTHER; note = guanosine-3'-phosphate
  modified_base 10: mod_base = OTHER; note = adenosine-3'-phosphate
  modified_base 11: mod_base = OTHER; note = uridine-3'-phosphate
  modified_base 12: mod_base = OTHER; note = adenosine-3'-phosphate
  modified_base 13: mod_base = OTHER; note = adenosine-3'-phosphate
  modified_base 14: mod_base = OTHER; note = uridine-3'-phosphate
  modified_base 15: mod_base = OTHER; note = uridine-3'-phosphate
  modified_base 16: mod_base = OTHER; note = uridine-3'-phosphate
  modified_base 17: mod_base = OTHER; note = uridine-3'-phosphate
  modified_base 18: mod_base = OTHER; note = guanosine-3'-phosphate
  modified_base 19: mod_base = OTHER; note = cytidine-3'-phosphate
  misc_feature 1..19: note = RNA
  misc_feature 20..21: note = DNA
ccaaagtggataattttgctt

SEQ ID NO: 2490 - DNA, 21 bp, synthetic construct
  source 1..21: mol_type = other DNA
  modified_base 1: mod_base = OTHER; note = uridine-3'-phosphate
  modified_base 2: mod_base = OTHER; note = cytidine-3'-phosphate
  modified_base 3: mod_base = OTHER; note = uridine-3'-phosphate
  modified_base 4: mod_base = OTHER; note = cytidine-3'-phosphate
  modified_base 5: mod_base = OTHER; note = cytidine-3'-phosphate
  modified_base 6: mod_base = OTHER; note = cytidine-3'-phosphate
  modified_base 7: mod_base = OTHER; note = uridine-3'-phosphate
  modified_base 8: mod_base = OTHER; note = cytidine-3'-phosphate
  modified_base 9: mod_base = OTHER; note = guanosine-3'-phosphate
  modified_base 10: mod_base = OTHER; note = uridine-3'-phosphate
  modified_base 11: mod_base = OTHER; note = guanosine-3'-phosphate
  modified_base 12: mod_base = OTHER; note = cytidine-3'-phosphate
  modified_base 13: mod_base = OTHER; note = cytidine-3'-phosphate
  modified_base 14: mod_base = OTHER; note = adenosine-3'-phosphate
  modified_base 15: mod_base = OTHER; note = adenosine-3'-phosphate
  modified_base 16: mod_base = OTHER; note = adenosine-3'-phosphate
  modified_base 17: mod_base = OTHER; note = guanosine-3'-phosphate
  modified_base 18: mod_base = OTHER; note = uridine-3'-phosphate
  modified_base 19: mod_base = OTHER; note = guanosine-3'-phosphate
  misc_feature 1..19: note = RNA
  misc_feature 20..21: note = DNA
tctccctcgtgccaaagtgtt

SEQ ID NO: 2491 - DNA, 21 bp, synthetic construct
  source 1..21: mol_type = other DNA
  modified_base 1: mod_base = OTHER; note = uridine-3'-phosphate
  modified_base 2: mod_base = OTHER; note = cytidine-3'-phosphate
  modified_base 3: mod_base = OTHER; note = uridine-3'-phosphate
  modified_base 4: mod_base = OTHER; note = guanosine-3'-phosphate
  modified_base 5: mod_base = OTHER; note = adenosine-3'-phosphate
  modified_base 6: mod_base = OTHER; note = adenosine-3'-phosphate
  modified_base 7: mod_base = OTHER; note = adenosine-3'-phosphate
  modified_base 8: mod_base = OTHER; note = adenosine-3'-phosphate
  modified_base 9: mod_base = OTHER; note = uridine-3'-phosphate
  modified_base 10: mod_base = OTHER; note = uridine-3'-phosphate
  modified_base 11: mod_base = OTHER; note = uridine-3'-phosphate
  modified_base 12: mod_base = OTHER; note = cytidine-3'-phosphate
  modified_base 13: mod_base = OTHER; note = uridine-3'-phosphate
  modified_base 14: mod_base = OTHER; note = cytidine-3'-phosphate
  modified_base 15: mod_base = OTHER; note = cytidine-3'-phosphate
  modified_base 16: mod_base = OTHER; note = cytidine-3'-phosphate
  modified_base 17: mod_base = OTHER; note = uridine-3'-phosphate
  modified_base 18: mod_base = OTHER; note = cytidine-3'-phosphate
  modified_base 19: mod_base = OTHER; note = guanosine-3'-phosphate
  misc_feature 1..19: note = RNA
  misc_feature 20..21: note = DNA
tctgaaaatttctccctcgtt

SEQ ID NO: 2492 - DNA, 21 bp, synthetic construct
  source 1..21: mol_type = other DNA
  modified_base 1: mod_base = OTHER; note = adenosine-3'-phosphate
  modified_base 2: mod_base = OTHER; note = uridine-3'-phosphate
  modified_base 3: mod_base = OTHER; note = adenosine-3'-phosphate
  modified_base 4: mod_base = OTHER; note = adenosine-3'-phosphate
  modified_base 5: mod_base = OTHER; note = guanosine-3'-phosphate
  modified_base 6: mod_base = OTHER; note = adenosine-3'-phosphate
  modified_base 7: mod_base = OTHER; note = uridine-3'-phosphate
  modified_base 8: mod_base = OTHER; note = guanosine-3'-phosphate
  modified_base 9: mod_base = OTHER; note = cytidine-3'-phosphate
  modified_base 10: mod_base = OTHER; note = adenosine-3'-phosphate
  modified_base 11: mod_base = OTHER; note = uridine-3'-phosphate
  modified_base 12: mod_base = OTHER; note = cytidine-3'-phosphate
  modified_base 13: mod_base = OTHER; note = uridine-3'-phosphate
  modified_base 14: mod_base = OTHER; note = guanosine-3'-phosphate
  modified_base 15: mod_base = OTHER; note = adenosine-3'-phosphate
  modified_base 16: mod_base = OTHER; note = adenosine-3'-phosphate
  modified_base 17: mod_base = OTHER; note = adenosine-3'-phosphate
  modified_base 18: mod_base = OTHER; note = adenosine-3'-phosphate
  modified_base 19: mod_base = OTHER; note = uridine-3'-phosphate
  misc_feature 1..19: note = RNA
  misc_feature 20..21: note = DNA
ataagatgcatctgaaaattt

SEQ ID NO: 2493 - DNA, 21 bp, synthetic construct
  source 1..21: mol_type = other DNA
  modified_base 1: mod_base = OTHER; note = uridine-3'-phosphate
  modified_base 2: mod_base = OTHER; note = uridine-3'-phosphate
  modified_base 3: mod_base = OTHER; note = adenosine-3'-phosphate
  modified_base 4: mod_base = OTHER; note = uridine-3'-phosphate
  modified_base 5: mod_base = OTHER; note = adenosine-3'-phosphate
  modified_base 6: mod_base = OTHER; note = cytidine-3'-phosphate
  modified_base 7: mod_base = OTHER; note = uridine-3'-phosphate
  modified_base 8: mod_base = OTHER; note = uridine-3'-phosphate
  modified_base 9: mod_base = OTHER; note = uridine-3'-phosphate
  modified_base 10: mod_base = OTHER; note = guanosine-3'-phosphate
  modified_base 11: mod_base = OTHER; note = adenosine-3'-phosphate
  modified_base 12: mod_base = OTHER; note = uridine-3'-phosphate
  modified_base 13: mod_base = OTHER; note = adenosine-3'-phosphate
  modified_base 14: mod_base = OTHER; note = adenosine-3'-phosphate
  modified_base 15: mod_base = OTHER; note = guanosine-3'-phosphate
  modified_base 16: mod_base = OTHER; note = adenosine-3'-phosphate
  modified_base 17: mod_base = OTHER; note = uridine-3'-phosphate
  modified_base 18: mod_base = OTHER; note = guanosine-3'-phosphate
  modified_base 19: mod_base = OTHER; note = cytidine-3'-phosphate
  misc_feature 1..19: note = RNA
  misc_feature 20..21: note = DNA
ttatactttgataagatgctt

SEQ ID NO: 2494 - DNA, 21 bp, synthetic construct
  source 1..21: mol_type = other DNA
  modified_base 1: mod_base = OTHER; note = cytidine-3'-phosphate
  modified_base 2: mod_base = OTHER; note = uridine-3'-phosphate
  modified_base 3: mod_base = OTHER; note = guanosine-3'-phosphate
  modified_base 4: mod_base = OTHER; note = guanosine-3'-phosphate
  modified_base 5: mod_base = OTHER; note = adenosine-3'-phosphate
  modified_base 6: mod_base = OTHER; note = adenosine-3'-phosphate
  modified_base 7: mod_base = OTHER; note = uridine-3'-phosphate
  modified_base 8: mod_base = OTHER; note = guanosine-3'-phosphate
  modified_base 9: mod_base = OTHER; note = uridine-3'-phosphate
  modified_base 10: mod_base = OTHER; note = uridine-3'-phosphate
  modified_base 11: mod_base = OTHER; note = uridine-3'-phosphate
  modified_base 12: mod_base = OTHER; note = adenosine-3'-phosphate
  modified_base 13: mod_base = OTHER; note = uridine-3'-phosphate
  modified_base 14: mod_base = OTHER; note = adenosine-3'-phosphate
  modified_base 15: mod_base = OTHER; note = cytidine-3'-phosphate
  modified_base 16: mod_base = OTHER; note = uridine-3'-phosphate
  modified_base 17: mod_base = OTHER; note = uridine-3'-phosphate
  modified_base 18: mod_base = OTHER; note = uridine-3'-phosphate
  modified_base 19: mod_base = OTHER; note = guanosine-3'-phosphate
  misc_feature 1..19: note = RNA
  misc_feature 20..21: note = DNA
ctggaatgtttatactttgtt

SEQ ID NO: 2495 - DNA, 21 bp, synthetic construct
  source 1..21: mol_type = other DNA
  modified_base 1: mod_base = OTHER; note = uridine-3'-phosphate
  modified_base 2: mod_base = OTHER; note = guanosine-3'-phosphate
  modified_base 3: mod_base = OTHER; note = uridine-3'-phosphate
  modified_base 4: mod_base = OTHER; note = uridine-3'-phosphate
  modified_base 5: mod_base = OTHER; note = cytidine-3'-phosphate
  modified_base 6: mod_base = OTHER; note = uridine-3'-phosphate
  modified_base 7: mod_base = OTHER; note = guanosine-3'-phosphate
  modified_base 8: mod_base = OTHER; note = uridine-3'-phosphate
  modified_base 9: mod_base = OTHER; note = guanosine-3'-phosphate
  modified_base 10: mod_base = OTHER; note = uridine-3'-phosphate
  modified_base 11: mod_base = OTHER; note = uridine-3'-phosphate
  modified_base 12: mod_base = OTHER; note = adenosine-3'-phosphate
  modified_base 13: mod_base = OTHER; note = cytidine-3'-phosphate
  modified_base 14: mod_base = OTHER; note = uridine-3'-phosphate
  modified_base 15: mod_base = OTHER; note = guanosine-3'-phosphate
  modified_base 16: mod_base = OTHER; note = guanosine-3'-phosphate
  modified_base 17: mod_base = OTHER; note = adenosine-3'-phosphate
  modified_base 18: mod_base = OTHER; note = adenosine-3'-phosphate
  modified_base 19: mod_base = OTHER; note = uridine-3'-phosphate
  misc_feature 1..19: note = RNA
  misc_feature 20..21: note = DNA
tgttctgtgttactggaattt

SEQ ID NO: 2496 - DNA, 21 bp, synthetic construct
  source 1..21: mol_type = other DNA
  modified_base 1: mod_base = OTHER; note = guanosine-3'-phosphate
  modified_base 2: mod_base = OTHER; note = adenosine-3'-phosphate
  modified_base 3: mod_base = OTHER; note = adenosine-3'-phosphate
  modified_base 4: mod_base = OTHER; note = guanosine-3'-phosphate
  modified_base 5: mod_base = OTHER; note = guanosine-3'-phosphate
  modified_base 6: mod_base = OTHER; note = adenosine-3'-phosphate
  modified_base 7: mod_base = OTHER; note = adenosine-3'-phosphate
  modified_base 8: mod_base = OTHER; note = cytidine-3'-phosphate
  modified_base 9: mod_base = OTHER; note = cytidine-3'-phosphate
  modified_base 10: mod_base = OTHER; note = adenosine-3'-phosphate
  modified_base 11: mod_base = OTHER; note = uridine-3'-phosphate
  modified_base 12: mod_base = OTHER; note = guanosine-3'-phosphate
  modified_base 13: mod_base = OTHER; note = uridine-3'-phosphate
  modified_base 14: mod_base = OTHER; note = uridine-3'-phosphate
  modified_base 15: mod_base = OTHER; note = cytidine-3'-phosphate
  modified_base 16: mod_base = OTHER; note = uridine-3'-phosphate
  modified_base 17: mod_base = OTHER; note = guanosine-3'-phosphate
  modified_base 18: mod_base = OTHER; note = uridine-3'-phosphate
  modified_base 19: mod_base = OTHER; note = guanosine-3'-phosphate
  misc_feature 1..19: note = RNA
  misc_feature 20..21: note = DNA
gaaggaaccatgttctgtgtt

SEQ ID NO: 2497 - DNA, 21 bp, synthetic construct
  source 1..21: mol_type = other DNA
  modified_base 1: mod_base = OTHER; note = adenosine-3'-phosphate
  modified_base 2: mod_base = OTHER; note = adenosine-3'-phosphate
  modified_base 3: mod_base = OTHER; note = guanosine-3'-phosphate
  modified_base 4: mod_base = OTHER; note = uridine-3'-phosphate
  modified_base 5: mod_base = OTHER; note = cytidine-3'-phosphate
  modified_base 6: mod_base = OTHER; note = guanosine-3'-phosphate
  modified_base 7: mod_base = OTHER; note = guanosine-3'-phosphate
  modified_base 8: mod_base = OTHER; note = guanosine-3'-phosphate
  modified_base 9: mod_base = OTHER; note = adenosine-3'-phosphate
  modified_base 10: mod_base = OTHER; note = uridine-3'-phosphate
  modified_base 11: mod_base = OTHER; note = guanosine-3'-phosphate
  modified_base 12: mod_base = OTHER; note = adenosine-3'-phosphate
  modified_base 13: mod_base = OTHER; note = adenosine-3'-phosphate
  modified_base 14: mod_base = OTHER; note = guanosine-3'-phosphate
  modified_base 15: mod_base = OTHER; note = guanosine-3'-phosphate
  modified_base 16: mod_base = OTHER; note = adenosine-3'-phosphate
  modified_base 17: mod_base = OTHER; note = adenosine-3'-phosphate
  modified_base 18: mod_base = OTHER; note = cytidine-3'-phosphate
  modified_base 19: mod_base = OTHER; note = cytidine-3'-phosphate
  misc_feature 1..19: note = RNA
  misc_feature 20..21: note = DNA
aagtcgggatgaaggaacctt

SEQ ID NO: 2498 - DNA, 21 bp, synthetic construct
  source 1..21: mol_type = other DNA
  modified_base 1: mod_base = OTHER; note = uridine-3'-phosphate
  modified_base 2: mod_base = OTHER; note = adenosine-3'-phosphate
  modified_base 3: mod_base = OTHER; note = adenosine-3'-phosphate
  modified_base 4: mod_base = OTHER; note = uridine-3'-phosphate
  modified_base 5: mod_base = OTHER; note = adenosine-3'-phosphate
  modified_base 6: mod_base = OTHER; note = guanosine-3'-phosphate
  modified_base 7: mod_base = OTHER; note = adenosine-3'-phosphate
  modified_base 8: mod_base = OTHER; note = cytidine-3'-phosphate
  modified_base 9: mod_base = OTHER; note = cytidine-3'-phosphate
  modified_base 10: mod_base = OTHER; note = adenosine-3'-phosphate
  modified_base 11: mod_base = OTHER; note = guanosine-3'-phosphate
  modified_base 12: mod_base = OTHER; note = adenosine-3'-phosphate
  modified_base 13: mod_base = OTHER; note = adenosine-3'-phosphate
  modified_base 14: mod_base = OTHER; note = guanosine-3'-phosphate
  modified_base 15: mod_base = OTHER; note = uridine-3'-phosphate
  modified_base 16: mod_base = OTHER; note = cytidine-3'-phosphate
  modified_base 17: mod_base = OTHER; note = guanosine-3'-phosphate
  modified_base 18: mod_base = OTHER; note = guanosine-3'-phosphate
  modified_base 19: mod_base = OTHER; note = guanosine-3'-phosphate
  misc_feature 1..19: note = RNA
  misc_feature 20..21: note = DNA
taatagaccagaagtcgggtt

SEQ ID NO: 2499 - DNA, 21 bp, synthetic construct
  source 1..21: mol_type = other DNA
  modified_base 1: mod_base = OTHER; note = uridine-3'-phosphate
  modified_base 2: mod_base = OTHER; note = guanosine-3'-phosphate
  modified_base 3: mod_base = OTHER; note = uridine-3'-phosphate
  modified_base 4: mod_base = OTHER; note = guanosine-3'-phosphate
  modified_base 5: mod_base = OTHER; note = adenosine-3'-phosphate
  modified_base 6: mod_base = OTHER; note = cytidine-3'-phosphate
  modified_base 7: mod_base = OTHER; note = guanosine-3'-phosphate
  modified_base 8: mod_base = OTHER; note = adenosine-3'-phosphate
  modified_base 9: mod_base = OTHER; note = uridine-3'-phosphate
  modified_base 10: mod_base = OTHER; note = guanosine-3'-phosphate
  modified_base 11: mod_base = OTHER; note = uridine-3'-phosphate
  modified_base 12: mod_base = OTHER; note = adenosine-3'-phosphate
  modified_base 13: mod_base = OTHER; note = adenosine-3'-phosphate
  modified_base 14: mod_base = OTHER; note = uridine-3'-phosphate
  modified_base 15: mod_base = OTHER; note = adenosine-3'-phosphate
  modified_base 16: mod_base = OTHER; note = guanosine-3'-phosphate
  modified_base 17: mod_base = OTHER; note = adenosine-3'-phosphate
  modified_base 18: mod_base = OTHER; note = cytidine-3'-phosphate
  modified_base 19: mod_base = OTHER; note = cytidine-3'-phosphate
  misc_feature 1..19: note = RNA
  misc_feature 20..21: note = DNA
tgtgacgatgtaatagacctt

SEQ ID NO: 2500 - DNA, 21 bp, synthetic construct
  source 1..21: mol_type = other DNA
  modified_base 1: mod_base = OTHER; note = uridine-3'-phosphate
  modified_base 2: mod_base = OTHER; note = cytidine-3'-phosphate
  modified_base 3: mod_base = OTHER; note = uridine-3'-phosphate
  modified_base 4: mod_base = OTHER; note = guanosine-3'-phosphate
  modified_base 5: mod_base = OTHER; note = uridine-3'-phosphate
  modified_base 6: mod_base = OTHER; note = uridine-3'-phosphate
  modified_base 7: mod_base = OTHER; note = cytidine-3'-phosphate
  modified_base 8: mod_base = OTHER; note = uridine-3'-phosphate
  modified_base 9: mod_base = OTHER; note = cytidine-3'-phosphate
  modified_base 10: mod_base = OTHER; note = cytidine-3'-phosphate
  modified_base 11: mod_base = OTHER; note = uridine-3'-phosphate
  modified_base 12: mod_base = OTHER; note = guanosine-3'-phosphate
  modified_base 13: mod_base = OTHER; note = uridine-3'-phosphate
  modified_base 14: mod_base = OTHER; note = guanosine-3'-phosphate
  modified_base 15: mod_base = OTHER; note = adenosine-3'-phosphate
  modified_base 16: mod_base = OTHER; note = cytidine-3'-phosphate
  modified_base 17: mod_base = OTHER; note = guanosine-3'-phosphate
  modified_base 18: mod_base = OTHER; note = adenosine-3'-phosphate
  modified_base 19: mod_base = OTHER; note = uridine-3'-phosphate
  misc_feature 1..19: note = RNA
  misc_feature 20..21: note = DNA
tctgttctcctgtgacgattt

SEQ ID NO: 2501 - DNA, 21 bp, synthetic construct
  source 1..21: mol_type = other DNA
  modified_base 1: mod_base = OTHER; note = uridine-3'-phosphate
  modified_base 2: mod_base = OTHER; note = cytidine-3'-phosphate
  modified_base 3: mod_base = OTHER; note = uridine-3'-phosphate
  modified_base 4: mod_base = OTHER; note = guanosine-3'-phosphate
  modified_base 5: mod_base = OTHER; note = cytidine-3'-phosphate
  modified_base 6: mod_base = OTHER; note = uridine-3'-phosphate
  modified_base 7: mod_base = OTHER; note = guanosine-3'-phosphate
  modified_base 8: mod_base = OTHER; note = uridine-3'-phosphate
  modified_base 9: mod_base = OTHER; note = cytidine-3'-phosphate
  modified_base 10: mod_base = OTHER; note = uridine-3'-phosphate
  modified_base 11: mod_base = OTHER; note = guanosine-3'-phosphate
  modified_base 12: mod_base = OTHER; note = uridine-3'-phosphate
  modified_base 13: mod_base = OTHER; note = uridine-3'-phosphate
  modified_base 14: mod_base = OTHER; note = cytidine-3'-phosphate
  modified_base 15: mod_base = OTHER; note = uridine-3'-phosphate
  modified_base 16: mod_base = OTHER; note = cytidine-3'-phosphate
  modified_base 17: mod_base = OTHER; note = cytidine-3'-phosphate
  modified_base 18: mod_base = OTHER; note = uridine-3'-phosphate
  modified_base 19: mod_base = OTHER; note = guanosine-3'-phosphate
  misc_feature 1..19: note = RNA
  misc_feature 20..21: note = DNA
tctgctgtctgttctcctgtt

SEQ ID NO: 2502 - DNA, 21 bp, synthetic construct
  source 1..21: mol_type = other DNA
  modified_base 1: mod_base = OTHER; note = uridine-3'-phosphate
  modified_base 2: mod_base = OTHER; note = cytidine-3'-phosphate
  modified_base 3: mod_base = OTHER; note = adenosine-3'-phosphate
  modified_base 4: mod_base = OTHER; note = guanosine-3'-phosphate
  modified_base 5: mod_base = OTHER; note = adenosine-3'-phosphate
  modified_base 6: mod_base = OTHER; note = cytidine-3'-phosphate
  modified_base 7: mod_base = OTHER; note = adenosine-3'-phosphate
  modified_base 8: mod_base = OTHER; note = cytidine-3'-phosphate
  modified_base 9: mod_base = OTHER; note = uridine-3'-phosphate
  modified_base 10: mod_base = OTHER; note = adenosine-3'-phosphate
  modified_base 11: mod_base = OTHER; note = adenosine-3'-phosphate
  modified_base 12: mod_base = OTHER; note = uridine-3'-phosphate
  modified_base 13: mod_base = OTHER; note = uridine-3'-phosphate
  modified_base 14: mod_base = OTHER; note = cytidine-3'-phosphate
  modified_base 15: mod_base = OTHER; note = uridine-3'-phosphate
  modified_base 16: mod_base = OTHER; note = guanosine-3'-phosphate
  modified_base 17: mod_base = OTHER; note = cytidine-3'-phosphate
  modified_base 18: mod_base = OTHER; note = uridine-3'-phosphate
  modified_base 19: mod_base = OTHER; note = guanosine-3'-phosphate
  misc_feature 1..19: note = RNA
  misc_feature 20..21: note = DNA
tcagacactaattctgctgtt

SEQ ID NO: 2503 - DNA, 21 bp, synthetic construct
  source 1..21: mol_type = other DNA
  modified_base 1: mod_base = OTHER; note = adenosine-3'-phosphate
  modified_base 2: mod_base = OTHER; note = cytidine-3'-phosphate
  modified_base 3: mod_base = OTHER; note = cytidine-3'-phosphate
  modified_base 4: mod_base = OTHER; note = adenosine-3'-phosphate
  modified_base 5: mod_base = OTHER; note = guanosine-3'-phosphate
  modified_base 6: mod_base = OTHER; note = adenosine-3'-phosphate
  modified_base 7: mod_base = OTHER; note = cytidine-3'-phosphate
  modified_base 8: mod_base = OTHER; note = uridine-3'-phosphate
  modified_base 9: mod_base = OTHER; note = guanosine-3'-phosphate
  modified_base 10: mod_base = OTHER; note = adenosine-3'-phosphate
  modified_base 11: mod_base = OTHER; note = adenosine-3'-phosphate
  modified_base 12: mod_base = OTHER; note = uridine-3'-phosphate
  modified_base 13: mod_base = OTHER; note = cytidine-3'-phosphate
  modified_base 14: mod_base = OTHER; note = adenosine-3'-phosphate
  modified_base 15: mod_base = OTHER; note = guanosine-3'-phosphate
  modified_base 16: mod_base = OTHER; note = adenosine-3'-phosphate
  modified_base 17: mod_base = OTHER; note = cytidine-3'-phosphate
  modified_base 18: mod_base = OTHER; note = adenosine-3'-phosphate
  modified_base 19: mod_base = OTHER; note = cytidine-3'-phosphate
  misc_feature 1..19: note = RNA
  misc_feature 20..21: note = DNA
accagactgaatcagacactt

SEQ ID NO: 2504 - DNA, 21 bp, synthetic construct
  source 1..21: mol_type = other DNA
  modified_base 1: mod_base = OTHER; note = uridine-3'-phosphate
  modified_base 2: mod_base = OTHER; note = cytidine-3'-phosphate
  modified_base 3: mod_base = OTHER; note = adenosine-3'-phosphate
  modified_base 4: mod_base = OTHER; note = adenosine-3'-phosphate
  modified_base 5: mod_base = OTHER; note = uridine-3'-phosphate
  modified_base 6: mod_base = OTHER; note = adenosine-3'-phosphate
  modified_base 7: mod_base = OTHER; note = uridine-3'-phosphate
  modified_base 8: mod_base = OTHER; note = uridine-3'-phosphate
  modified_base 9: mod_base = OTHER; note = uridine-3'-phosphate
  modified_base 10: mod_base = OTHER; note = adenosine-3'-phosphate
  modified_base 11: mod_base = OTHER; note = adenosine-3'-phosphate
  modified_base 12: mod_base = OTHER; note = cytidine-3'-phosphate
  modified_base 13: mod_base = OTHER; note = cytidine-3'-phosphate
  modified_base 14: mod_base = OTHER; note = adenosine-3'-phosphate
  modified_base 15: mod_base = OTHER; note = guanosine-3'-phosphate
  modified_base 16: mod_base = OTHER; note = adenosine-3'-phosphate
  modified_base 17: mod_base = OTHER; note = cytidine-3'-phosphate
  modified_base 18: mod_base = OTHER; note = uridine-3'-phosphate
  modified_base 19: mod_base = OTHER; note = guanosine-3'-phosphate
  misc_feature 1..19: note = RNA
  misc_feature 20..21: note = DNA
tcaatatttaaccagactgtt

SEQ ID NO: 2505 - DNA, 21 bp, synthetic construct
  source 1..21: mol_type = other DNA
  modified_base 1: mod_base = OTHER; note = uridine-3'-phosphate
  modified_base 2: mod_base = OTHER; note = uridine-3'-phosphate
  modified_base 3: mod_base = OTHER; note = uridine-3'-phosphate
  modified_base 4: mod_base = OTHER; note = uridine-3'-phosphate
  modified_base 5: mod_base = OTHER; note = uridine-3'-phosphate
  modified_base 6: mod_base = OTHER; note = cytidine-3'-phosphate
  modified_base 7: mod_base = OTHER; note = uridine-3'-phosphate
  modified_base 8: mod_base = OTHER; note = uridine-3'-phosphate
  modified_base 9: mod_base = OTHER; note = cytidine-3'-phosphate
  modified_base 10: mod_base = OTHER; note = adenosine-3'-phosphate
  modified_base 11: mod_base = OTHER; note = adenosine-3'-phosphate
  modified_base 12: mod_base = OTHER; note = uridine-3'-phosphate
  modified_base 13: mod_base = OTHER; note = adenosine-3'-phosphate
  modified_base 14: mod_base = OTHER; note = uridine-3'-phosphate
  modified_base 15: mod_base = OTHER; note = uridine-3'-phosphate
  modified_base 16: mod_base = OTHER; note = uridine-3'-phosphate
  modified_base 17: mod_base = OTHER; note = adenosine-3'-phosphate
  modified_base 18: mod_base = OTHER; note = adenosine-3'-phosphate
  modified_base 19: mod_base = OTHER; note = cytidine-3'-phosphate
  misc_feature 1..19: note = RNA
  misc_feature 20..21: note = DNA
tttttcttcaatatttaactt

SEQ ID NO: 2506 - DNA, 21 bp, synthetic construct
  source 1..21: mol_type = other DNA
  modified_base 1: mod_base = OTHER; note = cytidine-3'-phosphate
  modified_base 2: mod_base = OTHER; note = uridine-3'-phosphate
  modified_base 3: mod_base = OTHER; note = guanosine-3'-phosphate
  modified_base 4: mod_base = OTHER; note = guanosine-3'-phosphate
  modified_base 5: mod_base = OTHER; note = uridine-3'-phosphate
  modified_base 6: mod_base = OTHER; note = uridine-3'-phosphate
  modified_base 7: mod_base = OTHER; note = guanosine-3'-phosphate
  modified_base 8: mod_base = OTHER; note = cytidine-3'-phosphate
  modified_base 9: mod_base = OTHER; note = cytidine-3'-phosphate
  modified_base 10: mod_base = OTHER; note = adenosine-3'-phosphate
  modified_base 11: mod_base = OTHER; note = cytidine-3'-phosphate
  modified_base 12: mod_base = OTHER; note = adenosine-3'-phosphate
  modified_base 13: mod_base = OTHER; note = uridine-3'-phosphate
  modified_base 14: mod_base = OTHER; note = uridine-3'-phosphate
  modified_base 15: mod_base = OTHER; note = uridine-3'-phosphate
  modified_base 16: mod_base = OTHER; note = uridine-3'-phosphate
  modified_base 17: mod_base = OTHER; note = uridine-3'-phosphate
  modified_base 18: mod_base = OTHER; note = cytidine-3'-phosphate
  modified_base 19: mod_base = OTHER; note = uridine-3'-phosphate
  misc_feature 1..19: note = RNA
  misc_feature 20..21: note = DNA
ctggttgccacatttttcttt

SEQ ID NO: 2507 - DNA, 21 bp, synthetic construct
  source 1..21: mol_type = other DNA
  modified_base 1: mod_base = OTHER; note = uridine-3'-phosphate
  modified_base 2: mod_base = OTHER; note = guanosine-3'-phosphate
  modified_base 3: mod_base = OTHER; note = adenosine-3'-phosphate
  modified_base 4: mod_base = OTHER; note = adenosine-3'-phosphate
  modified_base 5: mod_base = OTHER; note = cytidine-3'-phosphate
  modified_base 6: mod_base = OTHER; note = cytidine-3'-phosphate
  modified_base 7: mod_base = OTHER; note = uridine-3'-phosphate
  modified_base 8: mod_base = OTHER; note = guanosine-3'-phosphate
  modified_base 9: mod_base = OTHER; note = guanosine-3'-phosphate
  modified_base 10: mod_base = OTHER; note = adenosine-3'-phosphate
  modified_base 11: mod_base = OTHER; note = guanosine-3'-phosphate
  modified_base 12: mod_base = OTHER; note = cytidine-3'-phosphate
  modified_base 13: mod_base = OTHER; note = uridine-3'-phosphate
  modified_base 14: mod_base = OTHER; note = guanosine-3'-phosphate
  modified_base 15: mod_base = OTHER; note = guanosine-3'-phosphate
  modified_base 16: mod_base = OTHER; note = uridine-3'-phosphate
  modified_base 17: mod_base = OTHER; note = uridine-3'-phosphate
  modified_base 18: mod_base = OTHER; note = guanosine-3'-phosphate
  modified_base 19: mod_base = OTHER; note = cytidine-3'-phosphate
  misc_feature 1..19: note = RNA
  misc_feature 20..21: note = DNA
tgaacctggagctggttgctt

SEQ ID NO: 2508 - DNA, 21 bp, synthetic construct
  source 1..21: mol_type = other DNA
  modified_base 1: mod_base = OTHER; note = adenosine-3'-phosphate
  modified_base 2: mod_base = OTHER; note = guanosine-3'-phosphate
  modified_base 3: mod_base = OTHER; note = adenosine-3'-phosphate
  modified_base 4: mod_base = OTHER; note = cytidine-3'-phosphate
  modified_base 5: mod_base = OTHER; note = adenosine-3'-phosphate
  modified_base 6: mod_base = OTHER; note = guanosine-3'-phosphate
  modified_base 7: mod_base = OTHER; note = adenosine-3'-phosphate
  modified_base 8: mod_base = OTHER; note = uridine-3'-phosphate
  modified_base 9: mod_base = OTHER; note = guanosine-3'-phosphate
  modified_base 10: mod_base = OTHER; note = adenosine-3'-phosphate
  modified_base 11: mod_base = OTHER; note = adenosine-3'-phosphate
  modified_base 12: mod_base = OTHER; note = cytidine-3'-phosphate
  modified_base 13: mod_base = OTHER; note = cytidine-3'-phosphate
  modified_base 14: mod_base = OTHER; note = uridine-3'-phosphate
  modified_base 15: mod_base = OTHER; note = guanosine-3'-phosphate
  modified_base 16: mod_base = OTHER; note = guanosine-3'-phosphate
  modified_base 17: mod_base = OTHER; note = adenosine-3'-phosphate
  modified_base 18: mod_base = OTHER; note = guanosine-3'-phosphate
  modified_base 19: mod_base = OTHER; note = cytidine-3'-phosphate
  misc_feature 1..19: note = RNA
  misc_feature 20..21: note = DNA
agacagatgaacctggagctt

SEQ ID NO: 2509 - DNA, 21 bp, synthetic construct
  source 1..21: mol_type = other DNA
  modified_base 1: mod_base = OTHER; note = uridine-3'-phosphate
  modified_base 2: mod_base = OTHER; note = cytidine-3'-phosphate
  modified_base 3: mod_base = OTHER; note = uridine-3'-phosphate
  modified_base 4: mod_base = OTHER; note = guanosine-3'-phosphate
  modified_base 5: mod_base = OTHER; note = cytidine-3'-phosphate
  modified_base 6: mod_base = OTHER; note = adenosine-3'-phosphate
  modified_base 7: mod_base = OTHER; note = uridine-3'-phosphate
  modified_base 8: mod_base = OTHER; note = cytidine-3'-phosphate
  modified_base 9: mod_base = OTHER; note = adenosine-3'-phosphate
  modified_base 10: mod_base = OTHER; note = guanosine-3'-phosphate
  modified_base 11: mod_base = OTHER; note = guanosine-3'-phosphate
  modified_base 12: mod_base = OTHER; note = adenosine-3'-phosphate
  modified_base 13: mod_base = OTHER; note = guanosine-3'-phosphate
  modified_base 14: mod_base = OTHER; note = adenosine-3'-phosphate
  modified_base 15: mod_base = OTHER; note = cytidine-3'-phosphate
  modified_base 16: mod_base = OTHER; note = adenosine-3'-phosphate
  modified_base 17: mod_base = OTHER; note = guanosine-3'-phosphate
  modified_base 18: mod_base = OTHER; note = adenosine-3'-phosphate
  modified_base 19: mod_base = OTHER; note = uridine-3'-phosphate
  misc_feature 1..19: note = RNA
  misc_feature 20..21: note = DNA
tctgcatcaggagacagattt

SEQ ID NO: 2510 - DNA, 21 bp, synthetic construct
  source 1..21: mol_type = other DNA
  modified_base 1: mod_base = OTHER; note = guanosine-3'-phosphate
  modified_base 2: mod_base = OTHER; note = adenosine-3'-phosphate
  modified_base 3: mod_base = OTHER; note = guanosine-3'-phosphate
  modified_base 4: mod_base = OTHER; note = adenosine-3'-phosphate
  modified_base 5: mod_base = OTHER; note = adenosine-3'-phosphate
  modified_base 6: mod_base = OTHER; note = uridine-3'-phosphate
  modified_base 7: mod_base = OTHER; note = adenosine-3'-phosphate
  modified_base 8: mod_base = OTHER; note = uridine-3'-phosphate
  modified_base 9: mod_base = OTHER; note = guanosine-3'-phosphate
  modified_base 10: mod_base = OTHER; note = cytidine-3'-phosphate
  modified_base 11: mod_base = OTHER; note = adenosine-3'-phosphate
  modified_base 12: mod_base = OTHER; note = uridine-3'-phosphate
  modified_base 13: mod_base = OTHER; note = cytidine-3'-phosphate
  modified_base 14: mod_base = OTHER; note = uridine-3'-phosphate
  modified_base 15: mod_base = OTHER; note = guanosine-3'-phosphate
  modified_base 16: mod_base = OTHER; note = cytidine-3'-phosphate
  modified_base 17: mod_base = OTHER; note = adenosine-3'-phosphate
  modified_base 18: mod_base = OTHER; note = uridine-3'-phosphate
  modified_base 19: mod_base = OTHER; note = cytidine-3'-phosphate
  misc_feature 1..19: note = RNA
  misc_feature 20..21: note = DNA
gagaatatgcatctgcatctt

SEQ ID NO: 2511 - DNA, 21 bp, synthetic construct
  source 1..21: mol_type = other DNA
  modified_base 1: mod_base = OTHER; note = uridine-3'-phosphate
  modified_base 2: mod_base = OTHER; note = uridine-3'-phosphate
  modified_base 3: mod_base = OTHER; note = uridine-3'-phosphate
  modified_base 4: mod_base = OTHER; note = guanosine-3'-phosphate
  modified_base 5: mod_base = OTHER; note = guanosine-3'-phosphate
  modified_base 6: mod_base = OTHER; note = cytidine-3'-phosphate
  modified_base 7: mod_base = OTHER; note = cytidine-3'-phosphate
  modified_base 8: mod_base = OTHER; note = uridine-3'-phosphate
  modified_base 9: mod_base = OTHER; note = guanosine-3'-phosphate
  modified_base 10: mod_base = OTHER; note = guanosine-3'-phosphate
  modified_base 11: mod_base = OTHER; note = adenosine-3'-phosphate
  modified_base 12: mod_base = OTHER; note = guanosine-3'-phosphate
  modified_base 13: mod_base = OTHER; note = adenosine-3'-phosphate
  modified_base 14: mod_base = OTHER; note = adenosine-3'-phosphate
  modified_base 15: mod_base = OTHER; note = uridine-3'-phosphate
  modified_base 16: mod_base = OTHER; note = adenosine-3'-phosphate
  modified_base 17: mod_base = OTHER; note = uridine-3'-phosphate
  modified_base 18: mod_base = OTHER; note = guanosine-3'-phosphate
  modified_base 19: mod_base = OTHER; note = cytidine-3'-phosphate
  misc_feature 1..19: note = RNA
  misc_feature 20..21: note = DNA
tttggcctggagaatatgctt

SEQ ID NO: 2512 - DNA, 21 bp, synthetic construct
  source 1..21: mol_type = other DNA
  modified_base 1: mod_base = OTHER; note = adenosine-3'-phosphate
  modified_base 2: mod_base = OTHER; note = adenosine-3'-phosphate
  modified_base 3: mod_base = OTHER; note = guanosine-3'-phosphate
  modified_base 4: mod_base = OTHER; note = adenosine-3'-phosphate
  modified_base 5: mod_base = OTHER; note = guanosine-3'-phosphate
  modified_base 6: mod_base = OTHER; note = adenosine-3'-phosphate
  modified_base 7: mod_base = OTHER; note = cytidine-3'-phosphate
  modified_base 8: mod_base = OTHER; note = adenosine-3'-phosphate
  modified_base 9: mod_base = OTHER; note = cytidine-3'-phosphate
  modified_base 10: mod_base = OTHER; note = adenosine-3'-phosphate
  modified_base 11: mod_base = OTHER; note = guanosine-3'-phosphate
  modified_base 12: mod_base = OTHER; note = uridine-3'-phosphate
  modified_base 13: mod_base = OTHER; note = uridine-3'-phosphate
  modified_base 14: mod_base = OTHER; note = uridine-3'-phosphate
  modified_base 15: mod_base = OTHER; note = guanosine-3'-phosphate
  modified_base 16: mod_base = OTHER; note = guanosine-3'-phosphate
  modified_base 17: mod_base = OTHER; note = cytidine-3'-phosphate
  modified_base 18: mod_base = OTHER; note = cytidine-3'-phosphate
  modified_base 19: mod_base = OTHER; note = uridine-3'-phosphate
  misc_feature 1..19: note = RNA
  misc_feature 20..21: note = DNA
aagagacacagtttggccttt

SEQ ID NO: 2513 - DNA, 21 bp, synthetic construct
  source 1..21: mol_type = other DNA
  modified_base 1: mod_base = OTHER; note = uridine-3'-phosphate
  modified_base 2: mod_base = OTHER; note = uridine-3'-phosphate
  modified_base 3: mod_base = OTHER; note = guanosine-3'-phosphate
  modified_base 4: mod_base = OTHER; note = cytidine-3'-phosphate
  modified_base 5: mod_base = OTHER; note = cytidine-3'-phosphate
  modified_base 6: mod_base = OTHER; note = adenosine-3'-phosphate
  modified_base 7: mod_base = OTHER; note = uridine-3'-phosphate
  modified_base 8: mod_base = OTHER; note = adenosine-3'-phosphate
  modified_base 9: mod_base = OTHER; note = uridine-3'-phosphate
  modified_base 10: mod_base = OTHER; note = uridine-3'-phosphate
  modified_base 11: mod_base = OTHER; note = adenosine-3'-phosphate
  modified_base 12: mod_base = OTHER; note = adenosine-3'-phosphate
  modified_base 13: mod_base = OTHER; note = guanosine-3'-phosphate
  modified_base 14: mod_base = OTHER; note = adenosine-3'-phosphate
  modified_base 15: mod_base = OTHER; note = guanosine-3'-phosphate
  modified_base 16: mod_base = OTHER; note = adenosine-3'-phosphate
  modified_base 17: mod_base = OTHER; note = cytidine-3'-phosphate
  modified_base 18: mod_base = OTHER; note = adenosine-3'-phosphate
  modified_base 19: mod_base = OTHER; note = cytidine-3'-phosphate
  misc_feature 1..19: note = RNA
  misc_feature 20..21: note = DNA
ttgccatattaagagacactt

SEQ ID NO: 2514 - DNA, 21 bp, synthetic construct
  source 1..21: mol_type = other DNA
  modified_base 1: mod_base = OTHER; note = adenosine-3'-phosphate
  modified_base 2: mod_base = OTHER; note = uridine-3'-phosphate
  modified_base 3: mod_base = OTHER; note = uridine-3'-phosphate
  modified_base 4: mod_base = OTHER; note = cytidine-3'-phosphate
  modified_base 5: mod_base = OTHER; note = cytidine-3'-phosphate
  modified_base 6: mod_base = OTHER; note = adenosine-3'-phosphate
  modified_base 7: mod_base = OTHER; note = guanosine-3'-phosphate
  modified_base 8: mod_base = OTHER; note = uridine-3'-phosphate
  modified_base 9: mod_base = OTHER; note = uridine-3'-phosphate
  modified_base 10: mod_base = OTHER; note = guanosine-3'-phosphate
  modified_base 11: mod_base = OTHER; note = cytidine-3'-phosphate
  modified_base 12: mod_base = OTHER; note = cytidine-3'-phosphate
  modified_base 13: mod_base = OTHER; note = adenosine-3'-phosphate
  modified_base 14: mod_base = OTHER; note = uridine-3'-phosphate
  modified_base 15: mod_base = OTHER; note = adenosine-3'-phosphate
  modified_base 16: mod_base = OTHER; note = uridine-3'-phosphate
  modified_base 17: mod_base = OTHER; note = uridine-3'-phosphate
  modified_base 18: mod_base = OTHER; note = adenosine-3'-phosphate
  modified_base 19: mod_base = OTHER; note = adenosine-3'-phosphate
  misc_feature 1..19: note = RNA
  misc_feature 20..21: note = DNA
attccagttgccatattaatt

SEQ ID NO: 2515 - DNA, 21 bp, synthetic construct
  source 1..21: mol_type = other DNA
  modified_base 1: mod_base = OTHER; note = cytidine-3'-phosphate
  modified_base 2: mod_base = OTHER; note = cytidine-3'-phosphate
  modified_base 3: mod_base = OTHER; note = adenosine-3'-phosphate
  modified_base 4: mod_base = OTHER; note = guanosine-3'-phosphate
  modified_base 5: mod_base = OTHER; note = guanosine-3'-phosphate
  modified_base 6: mod_base = OTHER; note = adenosine-3'-phosphate
  modified_base 7: mod_base = OTHER; note = adenosine-3'-phosphate
  modified_base 8: mod_base = OTHER; note = uridine-3'-phosphate
  modified_base 9: mod_base = OTHER; note = cytidine-3'-phosphate
  modified_base 10: mod_base = OTHER; note = cytidine-3'-phosphate
  modified_base 11: mod_base = OTHER; note = adenosine-3'-phosphate
  modified_base 12: mod_base = OTHER; note = uridine-3'-phosphate
  modified_base 13: mod_base = OTHER; note = uridine-3'-phosphate
  modified_base 14: mod_base = OTHER; note = cytidine-3'-phosphate
  modified_base 15: mod_base = OTHER; note = cytidine-3'-phosphate
  modified_base 16: mod_base = OTHER; note = adenosine-3'-phosphate
  modified_base 17: mod_base = OTHER; note = guanosine-3'-phosphate
  modified_base 18: mod_base = OTHER; note = uridine-3'-phosphate
  modified_base 19: mod_base = OTHER; note = uridine-3'-phosphate
  misc_feature 1..19: note = RNA
  misc_feature 20..21: note = DNA
ccaggaatccattccagtttt

SEQ ID NO: 2516 - DNA, 21 bp, synthetic construct
  source 1..21: mol_type = other DNA
  modified_base 1: mod_base = OTHER; note = uridine-3'-phosphate
  modified_base 2: mod_base = OTHER; note = guanosine-3'-phosphate
  modified_base 3: mod_base = OTHER; note = cytidine-3'-phosphate
  modified_base 4: mod_base = OTHER; note = uridine-3'-phosphate
  modified_base 5: mod_base = OTHER; note = adenosine-3'-phosphate
  modified_base 6: mod_base = OTHER; note = adenosine-3'-phosphate
  modified_base 7: mod_base = OTHER; note = uridine-3'-phosphate
  modified_base 8: mod_base = OTHER; note = guanosine-3'-phosphate
  modified_base 9: mod_base = OTHER; note = cytidine-3'-phosphate
  modified_base 10: mod_base = OTHER; note = cytidine-3'-phosphate
  modified_base 11: mod_base = OTHER; note = adenosine-3'-phosphate
  modified_base 12: mod_base = OTHER; note = cytidine-3'-phosphate
  modified_base 13: mod_base = OTHER; note = cytidine-3'-phosphate
  modified_base 14: mod_base = OTHER; note = cytidine-3'-phosphate
  modified_base 15: mod_base = OTHER; note = adenosine-3'-phosphate
  modified_base 16: mod_base = OTHER; note = guanosine-3'-phosphate
  modified_base 17: mod_base = OTHER; note = guanosine-3'-phosphate
  modified_base 18: mod_base = OTHER; note = adenosine-3'-phosphate
  modified_base 19: mod_base = OTHER; note = adenosine-3'-phosphate
  misc_feature 1..19: note = RNA
  misc_feature 20..21: note = DNA
tgctaatgccacccaggaatt

SEQ ID NO: 2517 - DNA, 21 bp, synthetic construct
  source 1..21: mol_type = other DNA
  modified_base 1: mod_base = OTHER; note = guanosine-3'-phosphate
  modified_base 2: mod_base = OTHER; note = uridine-3'-phosphate
  modified_base 3: mod_base = OTHER; note = cytidine-3'-phosphate
  modified_base 4: mod_base = OTHER; note = cytidine-3'-phosphate
  modified_base 5: mod_base = OTHER; note = adenosine-3'-phosphate
  modified_base 6: mod_base = OTHER; note = cytidine-3'-phosphate
  modified_base 7: mod_base = OTHER; note = uridine-3'-phosphate
  modified_base 8: mod_base = OTHER; note = guanosine-3'-phosphate
  modified_base 9: mod_base = OTHER; note = cytidine-3'-phosphate
  modified_base 10: mod_base = OTHER; note = uridine-3'-phosphate
  modified_base 11: mod_base = OTHER; note = guanosine-3'-phosphate
  modified_base 12: mod_base = OTHER; note = cytidine-3'-phosphate
  modified_base 13: mod_base = OTHER; note = uridine-3'-phosphate
  modified_base 14: mod_base = OTHER; note = adenosine-3'-phosphate
  modified_base 15: mod_base = OTHER; note = adenosine-3'-phosphate
  modified_base 16: mod_base = OTHER; note = uridine-3'-phosphate
  modified_base 17: mod_base = OTHER; note = guanosine-3'-phosphate
  modified_base 18: mod_base = OTHER; note = cytidine-3'-phosphate
  modified_base 19: mod_base = OTHER; note = cytidine-3'-phosphate
  misc_feature 1..19: note = RNA
  misc_feature 20..21: note = DNA
gtccactgctgctaatgcctt

SEQ ID NO: 2518 - DNA, 21 bp, synthetic construct
  source 1..21: mol_type = other DNA
  modified_base 1: mod_base = OTHER; note = adenosine-3'-phosphate
  modified_base 2: mod_base = OTHER; note = uridine-3'-phosphate
  modified_base 3: mod_base = OTHER; note = adenosine-3'-phosphate
  modified_base 4: mod_base = OTHER; note = cytidine-3'-phosphate
  modified_base 5: mod_base = OTHER; note = adenosine-3'-phosphate
  modified_base 6: mod_base = OTHER; note = cytidine-3'-phosphate
  modified_base 7: mod_base = OTHER; note = adenosine-3'-phosphate
  modified_base 8: mod_base = OTHER; note = guanosine-3'-phosphate
  modified_base 9: mod_base = OTHER; note = cytidine-3'-phosphate
  modified_base 10: mod_base = OTHER; note = adenosine-3'-phosphate
  modified_base 11: mod_base = OTHER; note = cytidine-3'-phosphate
  modified_base 12: mod_base = OTHER; note = uridine-3'-phosphate
  modified_base 13: mod_base = OTHER; note = guanosine-3'-phosphate
  modified_base 14: mod_base = OTHER; note = uridine-3'-phosphate
  modified_base 15: mod_base = OTHER; note = cytidine-3'-phosphate
  modified_base 16: mod_base = OTHER; note = cytidine-3'-phosphate
  modified_base 17: mod_base = OTHER; note = adenosine-3'-phosphate
  modified_base 18: mod_base = OTHER; note = cytidine-3'-phosphate
  modified_base 19: mod_base = OTHER; note = uridine-3'-phosphate
  misc_feature 1..19: note = RNA
  misc_feature 20..21: note = DNA
atacacagcactgtccacttt

SEQ ID NO: 2519 - DNA, 21 bp, synthetic construct
  source 1..21: mol_type = other DNA
  modified_base 1: mod_base = OTHER; note = uridine-3'-phosphate
  modified_base 2: mod_base = OTHER; note = uridine-3'-phosphate
  modified_base 3: mod_base = OTHER; note = uridine-3'-phosphate
  modified_base 4: mod_base = OTHER; note = guanosine-3'-phosphate
  modified_base 5: mod_base = OTHER; note = guanosine-3'-phosphate
  modified_base 6: mod_base = OTHER; note = adenosine-3'-phosphate
  modified_base 7: mod_base = OTHER; note = cytidine-3'-phosphate
  modified_base 8: mod_base = OTHER; note = uridine-3'-phosphate
  modified_base 9: mod_base = OTHER; note = cytidine-3'-phosphate
  modified_base 10: mod_base = OTHER; note = cytidine-3'-phosphate
  modified_base 11: mod_base = OTHER; note = adenosine-3'-phosphate
  modified_base 12: mod_base = OTHER; note = uridine-3'-phosphate
  modified_base 13: mod_base = OTHER; note = adenosine-3'-phosphate
  modified_base 14: mod_base = OTHER; note = cytidine-3'-phosphate
  modified_base 15: mod_base = OTHER; note = adenosine-3'-phosphate
  modified_base 16: mod_base = OTHER; note = cytidine-3'-phosphate
  modified_base 17: mod_base = OTHER; note = adenosine-3'-phosphate
  modified_base 18: mod_base = OTHER; note = guanosine-3'-phosphate
  modified_base 19: mod_base = OTHER; note = cytidine-3'-phosphate
  misc_feature 1..19: note = RNA
  misc_feature 20..21: note = DNA
tttggactccatacacagctt

SEQ ID NO: 2520 - DNA, 21 bp, synthetic construct
  source 1..21: mol_type = other DNA
  modified_base 1: mod_base = OTHER; note = uridine-3'-phosphate
  modified_base 2: mod_base = OTHER; note = uridine-3'-phosphate
  modified_base 3: mod_base = OTHER; note = uridine-3'-phosphate
  modified_base 4: mod_base = OTHER; note = guanosine-3'-phosphate
  modified_base 5: mod_base = OTHER; note = guanosine-3'-phosphate
  modified_base 6: mod_base = OTHER; note = cytidine-3'-phosphate
  modified_base 7: mod_base = OTHER; note = uridine-3'-phosphate
  modified_base 8: mod_base = OTHER; note = cytidine-3'-phosphate
  modified_base 9: mod_base = OTHER; note = cytidine-3'-phosphate
  modified_base 10: mod_base = OTHER; note = uridine-3'-phosphate
  modified_base 11: mod_base = OTHER; note = cytidine-3'-phosphate
  modified_base 12: mod_base = OTHER; note = uridine-3'-phosphate
  modified_base 13: mod_base = OTHER; note = uridine-3'-phosphate
  modified_base 14: mod_base = OTHER; note = uridine-3'-phosphate
  modified_base 15: mod_base = OTHER; note = guanosine-3'-phosphate
  modified_base 16: mod_base = OTHER; note = guanosine-3'-phosphate
  modified_base 17: mod_base = OTHER; note = adenosine-3'-phosphate
  modified_base 18: mod_base = OTHER; note = cytidine-3'-phosphate
  modified_base 19: mod_base = OTHER; note = uridine-3'-phosphate
  misc_feature 1..19: note = RNA
  misc_feature 20..21: note = DNA
tttggctcctctttggacttt

SEQ ID NO: 2521 - DNA, 21 bp, synthetic construct
  source 1..21: mol_type = other DNA
  modified_base 1: mod_base = OTHER; note = adenosine-3'-phosphate
  modified_base 2: mod_base = OTHER; note = guanosine-3'-phosphate
  modified_base 3: mod_base = OTHER; note = guanosine-3'-phosphate
  modified_base 4: mod_base = OTHER; note = guanosine-3'-phosphate
  modified_base 5: mod_base = OTHER; note = cytidine-3'-phosphate
  modified_base 6: mod_base = OTHER; note = uridine-3'-phosphate
  modified_base 7: mod_base = OTHER; note = uridine-3'-phosphate
  modified_base 8: mod_base = OTHER; note = uridine-3'-phosphate
  modified_base 9: mod_base = OTHER; note = uridine-3'-phosphate
  modified_base 10: mod_base = OTHER; note = uridine-3'-phosphate
  modified_base 11: mod_base = OTHER; note = guanosine-3'-phosphate
  modified_base 12: mod_base = OTHER; note = guanosine-3'-phosphate
  modified_base 13: mod_base = OTHER; note = cytidine-3'-phosphate
  modified_base 14: mod_base = OTHER; note = uridine-3'-phosphate
  modified_base 15: mod_base = OTHER; note = cytidine-3'-phosphate
  modified_base 16: mod_base = OTHER; note = cytidine-3'-phosphate
  modified_base 17: mod_base = OTHER; note = uridine-3'-phosphate
  modified_base 18: mod_base = OTHER; note = cytidine-3'-phosphate
  modified_base 19: mod_base = OTHER; note = uridine-3'-phosphate
  misc_feature 1..19: note = RNA
  misc_feature 20..21: note = DNA
agggctttttggctcctcttt

SEQ ID NO: 2522 - DNA, 21 bp, synthetic construct
  source 1..21: mol_type = other DNA
  modified_base 1: mod_base = OTHER; note = adenosine-3'-phosphate
  modified_base 2: mod_base = OTHER; note = adenosine-3'-phosphate
  modified_base 3: mod_base = OTHER; note = uridine-3'-phosphate
  modified_base 4: mod_base = OTHER; note = adenosine-3'-phosphate
  modified_base 5: mod_base = OTHER; note = cytidine-3'-phosphate
  modified_base 6: mod_base = OTHER; note = uridine-3'-phosphate
  modified_base 7: mod_base = OTHER; note = cytidine-3'-phosphate
  modified_base 8: mod_base = OTHER; note = uridine-3'-phosphate
  modified_base 9: mod_base = OTHER; note = uridine-3'-phosphate
  modified_base 10: mod_base = OTHER; note = uridine-3'-phosphate
  modified_base 11: mod_base = OTHER; note = cytidine-3'-phosphate
  modified_base 12: mod_base = OTHER; note = cytidine-3'-phosphate
  modified_base 13: mod_base = OTHER; note = adenosine-3'-phosphate
  modified_base 14: mod_base = OTHER; note = adenosine-3'-phosphate
  modified_base 15: mod_base = OTHER; note = guanosine-3'-phosphate
  modified_base 16: mod_base = OTHER; note = guanosine-3'-phosphate
  modified_base 17: mod_base = OTHER; note = guanosine-3'-phosphate
  modified_base 18: mod_base = OTHER; note = cytidine-3'-phosphate
  modified_base 19: mod_base = OTHER; note = uridine-3'-phosphate
  misc_feature 1..19: note = RNA
  misc_feature 20..21: note = DNA
aatactctttccaagggcttt

SEQ ID NO: 2523 - DNA, 21 bp, synthetic construct
  source 1..21: mol_type = other DNA
  modified_base 1: mod_base = OTHER; note = uridine-3'-phosphate
  modified_base 2: mod_base = OTHER; note = adenosine-3'-phosphate
  modified_base 3: mod_base = OTHER; note = adenosine-3'-phosphate
  modified_base 4: mod_base = OTHER; note = guanosine-3'-phosphate
  modified_base 5: mod_base = OTHER; note = adenosine-3'-phosphate
  modified_base 6: mod_base = OTHER; note = adenosine-3'-phosphate
  modified_base 7: mod_base = OTHER; note = uridine-3'-phosphate
  modified_base 8: mod_base = OTHER; note = uridine-3'-phosphate
  modified_base 9: mod_base = OTHER; note = guanosine-3'-phosphate
  modified_base 10: mod_base = OTHER; note = adenosine-3'-phosphate
  modified_base 11: mod_base = OTHER; note = adenosine-3'-phosphate
  modified_base 12: mod_base = OTHER; note = adenosine-3'-phosphate
  modified_base 13: mod_base = OTHER; note = uridine-3'-phosphate
  modified_base 14: mod_base = OTHER; note = adenosine-3'-phosphate
  modified_base 15: mod_base = OTHER; note = cytidine-3'-phosphate
  modified_base 16: mod_base = OTHER; note = uridine-3'-phosphate
  modified_base 17: mod_base = OTHER; note = cytidine-3'-phosphate
  modified_base 18: mod_base = OTHER; note = uridine-3'-phosphate
  modified_base 19: mod_base = OTHER; note = uridine-3'-phosphate
  misc_feature 1..19: note = RNA
  misc_feature 20..21: note = DNA
taagaattgaaatactctttt

SEQ ID NO: 2524 - DNA, 21 bp, synthetic construct
  source 1..21: mol_type = other DNA
  modified_base 1: mod_base = OTHER; note = uridine-3'-phosphate
  modified_base 2: mod_base = OTHER; note = cytidine-3'-phosphate
  modified_base 3: mod_base = OTHER; note = uridine-3'-phosphate
  modified_base 4: mod_base = OTHER; note = uridine-3'-phosphate
  modified_base 5: mod_base = OTHER; note = cytidine-3'-phosphate
  modified_base 6: mod_base = OTHER; note = uridine-3'-phosphate
  modified_base 7: mod_base = OTHER; note = cytidine-3'-phosphate
  modified_base 8: mod_base = OTHER; note = uridine-3'-phosphate
  modified_base 9: mod_base = OTHER; note = adenosine-3'-phosphate
  modified_base 10: mod_base = OTHER; note = adenosine-3'-phosphate
  modified_base 11: mod_base = OTHER; note = guanosine-3'-phosphate
  modified_base 12: mod_base = OTHER; note = adenosine-3'-phosphate
  modified_base 13: mod_base = OTHER; note = adenosine-3'-phosphate
  modified_base 14: mod_base = OTHER; note = uridine-3'-phosphate
  modified_base 15: mod_base = OTHER; note = uridine-3'-phosphate
  modified_base 16: mod_base = OTHER; note = guanosine-3'-phosphate
  modified_base 17: mod_base = OTHER; note = adenosine-3'-phosphate
  modified_base 18: mod_base = OTHER; note = adenosine-3'-phosphate
  modified_base 19: mod_base = OTHER; note = adenosine-3'-phosphate
  misc_feature 1..19: note = RNA
  misc_feature 20..21: note = DNA
tcttctctaagaattgaaatt

SEQ ID NO: 2525 - DNA, 21 bp, synthetic construct
  source 1..21: mol_type = other DNA
  modified_base 1: mod_base = OTHER; note = adenosine-3'-phosphate
  modified_base 2: mod_base = OTHER; note = guanosine-3'-phosphate
  modified_base 3: mod_base = OTHER; note = cytidine-3'-phosphate
  modified_base 4: mod_base = OTHER; note = cytidine-3'-phosphate
  modified_base 5: mod_base = OTHER; note = cytidine-3'-phosphate
  modified_base 6: mod_base = OTHER; note = adenosine-3'-phosphate
  modified_base 7: mod_base = OTHER; note = guanosine-3'-phosphate
  modified_base 8: mod_base = OTHER; note = adenosine-3'-phosphate
  modified_base 9: mod_base = OTHER; note = uridine-3'-phosphate
  modified_base 10: mod_base = OTHER; note = cytidine-3'-phosphate
  modified_base 11: mod_base = OTHER; note = adenosine-3'-phosphate
  modified_base 12: mod_base = OTHER; note = cytidine-3'-phosphate
  modified_base 13: mod_base = OTHER; note = uridine-3'-phosphate
  modified_base 14: mod_base = OTHER; note = cytidine-3'-phosphate
  modified_base 15: mod_base = OTHER; note = uridine-3'-phosphate
  modified_base 16: mod_base = OTHER; note = uridine-3'-phosphate
  modified_base 17: mod_base = OTHER; note = cytidine-3'-phosphate
  modified_base 18: mod_base = OTHER; note = uridine-3'-phosphate
  modified_base 19: mod_base = OTHER; note = cytidine-3'-phosphate
  misc_feature 1..19: note = RNA
  misc_feature 20..21: note = DNA
agcccagatcactcttctctt

SEQ ID NO: 2526 - DNA, 21 bp, synthetic construct
  source 1..21: mol_type = other DNA
  modified_base 1: mod_base = OTHER; note = uridine-3'-phosphate
  modified_base 2: mod_base = OTHER; note = guanosine-3'-phosphate
  modified_base 3: mod_base = OTHER; note = cytidine-3'-phosphate
  modified_base 4: mod_base = OTHER; note = cytidine-3'-phosphate
  modified_base 5: mod_base = OTHER; note = cytidine-3'-phosphate
  modified_base 6: mod_base = OTHER; note = cytidine-3'-phosphate
  modified_base 7: mod_base = OTHER; note = adenosine-3'-phosphate
  modified_base 8: mod_base = OTHER; note = cytidine-3'-phosphate
  modified_base 9: mod_base = OTHER; note = adenosine-3'-phosphate
  modified_base 10: mod_base = OTHER; note = guanosine-3'-phosphate
  modified_base 11: mod_base = OTHER; note = cytidine-3'-phosphate
  modified_base 12: mod_base = OTHER; note = cytidine-3'-phosphate
  modified_base 13: mod_base = OTHER; note = cytidine-3'-phosphate
  modified_base 14: mod_base = OTHER; note = adenosine-3'-phosphate
  modified_base 15: mod_base = OTHER; note = guanosine-3'-phosphate
  modified_base 16: mod_base = OTHER; note = adenosine-3'-phosphate
  modified_base 17: mod_base = OTHER; note = uridine-3'-phosphate
  modified_base 18: mod_base = OTHER; note = cytidine-3'-phosphate
  modified_base 19: mod_base = OTHER; note = adenosine-3'-phosphate
  misc_feature 1..19: note = RNA
  misc_feature 20..21: note = DNA
tgccccacagcccagatcatt

SEQ ID NO: 2527 - DNA, 21 bp, synthetic construct
  source 1..21: mol_type = other DNA
  modified_base 1: mod_base = OTHER; note = uridine-3'-phosphate
  modified_base 2: mod_base = OTHER; note = guanosine-3'-phosphate
  modified_base 3: mod_base = OTHER; note = adenosine-3'-phosphate
  modified_base 4: mod_base = OTHER; note = guanosine-3'-phosphate
  modified_base 5: mod_base = OTHER; note = guanosine-3'-phosphate
  modified_base 6: mod_base = OTHER; note = cytidine-3'-phosphate
  modified_base 7: mod_base = OTHER; note = cytidine-3'-phosphate
  modified_base 8: mod_base = OTHER; note = adenosine-3'-phosphate
  modified_base 9: mod_base = OTHER; note = cytidine-3'-phosphate
  modified_base 10: mod_base = OTHER; note = cytidine-3'-phosphate
  modified_base 11: mod_base = OTHER; note = adenosine-3'-phosphate
  modified_base 12: mod_base = OTHER; note = cytidine-3'-phosphate
  modified_base 13: mod_base = OTHER; note = cytidine-3'-phosphate
  modified_base 14: mod_base = OTHER; note = uridine-3'-phosphate
  modified_base 15: mod_base = OTHER; note = guanosine-3'-phosphate
  modified_base 16: mod_base = OTHER; note = cytidine-3'-phosphate
  modified_base 17: mod_base = OTHER; note = cytidine-3'-phosphate
  modified_base 18: mod_base = OTHER; note = cytidine-3'-phosphate
  modified_base 19: mod_base = OTHER; note = cytidine-3'-phosphate
  misc_feature 1..19: note = RNA
  misc_feature 20..21: note = DNA
tgaggccaccacctgcccctt

SEQ ID NO: 2528 - DNA, 21 bp, synthetic construct
  source 1..21: mol_type = other DNA
  modified_base 1: mod_base = OTHER; note = uridine-3'-phosphate
  modified_base 2: mod_base = OTHER; note = uridine-3'-phosphate
  modified_base 3: mod_base = OTHER; note = guanosine-3'-phosphate
  modified_base 4: mod_base = OTHER; note = guanosine-3'-phosphate
  modified_base 5: mod_base = OTHER; note = cytidine-3'-phosphate
  modified_base 6: mod_base = OTHER; note = adenosine-3'-phosphate
  modified_base 7: mod_base = OTHER; note = uridine-3'-phosphate
  modified_base 8: mod_base = OTHER; note = uridine-3'-phosphate
  modified_base 9: mod_base = OTHER; note = guanosine-3'-phosphate
  modified_base 10: mod_base = OTHER; note = uridine-3'-phosphate
  modified_base 11: mod_base = OTHER; note = uridine-3'-phosphate
  modified_base 12: mod_base = OTHER; note = guanosine-3'-phosphate
  modified_base 13: mod_base = OTHER; note = adenosine-3'-phosphate
  modified_base 14: mod_base = OTHER; note = guanosine-3'-phosphate
  modified_base 15: mod_base = OTHER; note = guanosine-3'-phosphate
  modified_base 16: mod_base = OTHER; note = cytidine-3'-phosphate
  modified_base 17: mod_base = OTHER; note = cytidine-3'-phosphate
  modified_base 18: mod_base = OTHER; note = adenosine-3'-phosphate
  modified_base 19: mod_base = OTHER; note = cytidine-3'-phosphate
  misc_feature 1..19: note = RNA
  misc_feature 20..21: note = DNA
ttggcattgttgaggccactt

SEQ ID NO: 2529 - DNA, 21 bp, synthetic construct
  source 1..21: mol_type = other DNA
  modified_base 1: mod_base = OTHER; note = guanosine-3'-phosphate
  modified_base 2: mod_base = OTHER; note = adenosine-3'-phosphate
  modified_base 3: mod_base = OTHER; note = adenosine-3'-phosphate
  modified_base 4: mod_base = OTHER; note = cytidine-3'-phosphate
  modified_base 5: mod_base = OTHER; note = adenosine-3'-phosphate
  modified_base 6: mod_base = OTHER; note = cytidine-3'-phosphate
  modified_base 7: mod_base = OTHER; note = adenosine-3'-phosphate
  modified_base 8: mod_base = OTHER; note = uridine-3'-phosphate
  modified_base 9: mod_base = OTHER; note = uridine-3'-phosphate
  modified_base 10: mod_base = OTHER; note = guanosine-3'-phosphate
  modified_base 11: mod_base = OTHER; note = guanosine-3'-phosphate
  modified_base 12: mod_base = OTHER; note = cytidine-3'-phosphate
  modified_base 13: mod_base = OTHER; note = adenosine-3'-phosphate
  modified_base 14: mod_base = OTHER; note = uridine-3'-phosphate
  modified_base 15: mod_base = OTHER; note = uridine-3'-phosphate
  modified_base 16: mod_base = OTHER; note = guanosine-3'-phosphate
  modified_base 17: mod_base = OTHER; note = uridine-3'-phosphate
  modified_base 18: mod_base = OTHER; note = uridine-3'-phosphate
  modified_base 19: mod_base = OTHER; note = guanosine-3'-phosphate
  misc_feature 1..19: note = RNA
  misc_feature 20..21: note = DNA
gaacacattggcattgttgtt

SEQ ID NO: 2530 - DNA, 21 bp, synthetic construct
  source 1..21: mol_type = other DNA
  modified_base 1: mod_base = OTHER; note = adenosine-3'-phosphate
  modified_base 2: mod_base = OTHER; note = guanosine-3'-phosphate
  modified_base 3: mod_base = OTHER; note = cytidine-3'-phosphate
  modified_base 4: mod_base = OTHER; note = uridine-3'-phosphate
  modified_base 5: mod_base = OTHER; note = adenosine-3'-phosphate
  modified_base 6: mod_base = OTHER; note = guanosine-3'-phosphate
  modified_base 7: mod_base = OTHER; note = guanosine-3'-phosphate
  modified_base 8: mod_base = OTHER; note = uridine-3'-phosphate
  modified_base 9: mod_base = OTHER; note = guanosine-3'-phosphate
  modified_base 10: mod_base = OTHER; note = guanosine-3'-phosphate
  modified_base 11: mod_base = OTHER; note = adenosine-3'-phosphate
  modified_base 12: mod_base = OTHER; note = adenosine-3'-phosphate
  modified_base 13: mod_base = OTHER; note = cytidine-3'-phosphate
  modified_base 14: mod_base = OTHER; note = adenosine-3'-phosphate
  modified_base 15: mod_base = OTHER; note = cytidine-3'-phosphate
  modified_base 16: mod_base = OTHER; note = adenosine-3'-phosphate
  modified_base 17: mod_base = OTHER; note = uridine-3'-phosphate
  modified_base 18: mod_base = OTHER; note = uridine-3'-phosphate
  modified_base 19: mod_base = OTHER; note = guanosine-3'-phosphate
  misc_feature 1..19: note = RNA
  misc_feature 20..21: note = DNA
agctaggtggaacacattgtt

SEQ ID NO: 2531 - DNA, 21 bp, synthetic construct
  source 1..21: mol_type = other DNA
  modified_base 1: mod_base = OTHER; note = adenosine-3'-phosphate
  modified_base 2: mod_base = OTHER; note = guanosine-3'-phosphate
  modified_base 3: mod_base = OTHER; note = guanosine-3'-phosphate
  modified_base 4: mod_base = OTHER; note = uridine-3'-phosphate
  modified_base 5: mod_base = OTHER; note = adenosine-3'-phosphate
  modified_base 6: mod_base = OTHER; note = adenosine-3'-phosphate
  modified_base 7: mod_base = OTHER; note = guanosine-3'-phosphate
  modified_base 8: mod_base = OTHER; note = uridine-3'-phosphate
  modified_base 9: mod_base = OTHER; note = cytidine-3'-phosphate
  modified_base 10: mod_base = OTHER; note = cytidine-3'-phosphate
  modified_base 11: mod_base = OTHER; note = adenosine-3'-phosphate
  modified_base 12: mod_base = OTHER; note = guanosine-3'-phosphate
  modified_base 13: mod_base = OTHER; note = cytidine-3'-phosphate
  modified_base 14: mod_base = OTHER; note = uridine-3'-phosphate
  modified_base 15: mod_base = OTHER; note = adenosine-3'-phosphate
  modified_base 16: mod_base = OTHER; note = guanosine-3'-phosphate
  modified_base 17: mod_base = OTHER; note = guanosine-3'-phosphate
  modified_base 18: mod_base = OTHER; note = uridine-3'-phosphate
  modified_base 19: mod_base = OTHER; note = guanosine-3'-phosphate
  misc_feature 1..19: note = RNA
  misc_feature 20..21: note = DNA
aggtaagtccagctaggtgtt

SEQ ID NO: 2532 - DNA, 21 bp, synthetic construct
  source 1..21: mol_type = other DNA
  modified_base 1: mod_base = OTHER; note = uridine-3'-phosphate
  modified_base 2: mod_base = OTHER; note = uridine-3'-phosphate
  modified_base 3: mod_base = OTHER; note = adenosine-3'-phosphate
  modified_base 4: mod_base = OTHER; note = guanosine-3'-phosphate
  modified_base 5: mod_base = OTHER; note = uridine-3'-phosphate
  modified_base 6: mod_base = OTHER; note = guanosine-3'-phosphate
  modified_base 7: mod_base = OTHER; note = adenosine-3'-phosphate
  modified_base 8: mod_base = OTHER; note = guanosine-3'-phosphate
  modified_base 9: mod_base = OTHER; note = guanosine-3'-phosphate
  modified_base 10: mod_base = OTHER; note = adenosine-3'-phosphate
  modified_base 11: mod_base = OTHER; note = adenosine-3'-phosphate
  modified_base 12: mod_base = OTHER; note = guanosine-3'-phosphate
  modified_base 13: mod_base = OTHER; note = guanosine-3'-phosphate
  modified_base 14: mod_base = OTHER; note = uridine-3'-phosphate
  modified_base 15: mod_base = OTHER; note = adenosine-3'-phosphate
  modified_base 16: mod_base = OTHER; note = adenosine-3'-phosphate
  modified_base 17: mod_base = OTHER; note = guanosine-3'-phosphate
  modified_base 18: mod_base = OTHER; note = uridine-3'-phosphate
  modified_base 19: mod_base = OTHER; note = cytidine-3'-phosphate
  misc_feature 1..19: note = RNA
  misc_feature 20..21: note = DNA
ttagtgaggaaggtaagtctt

SEQ ID NO: 2533 - DNA, 21 bp, synthetic construct
  source 1..21: mol_type = other DNA
  modified_base 1: mod_base = OTHER; note = uridine-3'-phosphate
  modified_base 2: mod_base = OTHER; note = cytidine-3'-phosphate
  modified_base 3: mod_base = OTHER; note = uridine-3'-phosphate
  modified_base 4: mod_base = OTHER; note = guanosine-3'-phosphate
  modified_base 5: mod_base = OTHER; note = cytidine-3'-phosphate
  modified_base 6: mod_base = OTHER; note = adenosine-3'-phosphate
  modified_base 7: mod_base = OTHER; note = uridine-3'-phosphate
  modified_base 8: mod_base = OTHER; note = uridine-3'-phosphate
  modified_base 9: mod_base = OTHER; note = uridine-3'-phosphate
  modified_base 10: mod_base = OTHER; note = guanosine-3'-phosphate
  modified_base 11: mod_base = OTHER; note = cytidine-3'-phosphate
  modified_base 12: mod_base = OTHER; note = adenosine-3'-phosphate
  modified_base 13: mod_base = OTHER; note = uridine-3'-phosphate
  modified_base 14: mod_base = OTHER; note = uridine-3'-phosphate
  modified_base 15: mod_base = OTHER; note = adenosine-3'-phosphate
  modified_base 16: mod_base = OTHER; note = guanosine-3'-phosphate
  modified_base 17: mod_base = OTHER; note = uridine-3'-phosphate
  modified_base 18: mod_base = OTHER; note = guanosine-3'-phosphate
  modified_base 19: mod_base = OTHER; note = adenosine-3'-phosphate
  misc_feature 1..19: note = RNA
  misc_feature 20..21: note = DNA
tctgcatttgcattagtgatt

SEQ ID NO: 2534 - DNA, 21 bp, synthetic construct
  source 1..21: mol_type = other DNA
  modified_base 1: mod_base = OTHER; note = uridine-3'-phosphate
  modified_base 2: mod_base = OTHER; note = uridine-3'-phosphate
  modified_base 3: mod_base = OTHER; note = guanosine-3'-phosphate
  modified_base 4: mod_base = OTHER; note = guanosine-3'-phosphate
  modified_base 5: mod_base = OTHER; note = guanosine-3'-phosphate
  modified_base 6: mod_base = OTHER; note = adenosine-3'-phosphate
  modified_base 7: mod_base = OTHER; note = guanosine-3'-phosphate
  modified_base 8: mod_base = OTHER; note = uridine-3'-phosphate
  modified_base 9: mod_base = OTHER; note = cytidine-3'-phosphate
  modified_base 10: mod_base = OTHER; note = adenosine-3'-phosphate
  modified_base 11: mod_base = OTHER; note = uridine-3'-phosphate
  modified_base 12: mod_base = OTHER; note = cytidine-3'-phosphate
  modified_base 13: mod_base = OTHER; note = uridine-3'-phosphate
  modified_base 14: mod_base = OTHER; note = guanosine-3'-phosphate
  modified_base 15: mod_base = OTHER; note = cytidine-3'-phosphate
  modified_base 16: mod_base = OTHER; note = adenosine-3'-phosphate
  modified_base 17: mod_base = OTHER; note = uridine-3'-phosphate
  modified_base 18: mod_base = OTHER; note = uridine-3'-phosphate
  modified_base 19: mod_base = OTHER; note = uridine-3'-phosphate
  misc_feature 1..19: note = RNA
  misc_feature 20..21: note = DNA
ttgggagtcatctgcattttt

SEQ ID NO: 2535 - DNA, 21 bp, synthetic construct
  source 1..21: mol_type = other DNA
  modified_base 1: mod_base = OTHER; note = uridine-3'-phosphate
  modified_base 2: mod_base = OTHER; note = uridine-3'-phosphate
  modified_base 3: mod_base = OTHER; note = cytidine-3'-phosphate
  modified_base 4: mod_base = OTHER; note = adenosine-3'-phosphate
  modified_base 5: mod_base = OTHER; note = uridine-3'-phosphate
  modified_base 6: mod_base = OTHER; note = cytidine-3'-phosphate
  modified_base 7: mod_base = OTHER; note = adenosine-3'-phosphate
  modified_base 8: mod_base = OTHER; note = uridine-3'-phosphate
  modified_base 9: mod_base = OTHER; note = uridine-3'-phosphate
  modified_base 10: mod_base = OTHER; note = uridine-3'-phosphate
  modified_base 11: mod_base = OTHER; note = uridine-3'-phosphate
  modified_base 12: mod_base = OTHER; note = cytidine-3'-phosphate
  modified_base 13: mod_base = OTHER; note = uridine-3'-phosphate
  modified_base 14: mod_base = OTHER; note = uridine-3'-phosphate
  modified_base 15: mod_base = OTHER; note = guanosine-3'-phosphate
  modified_base 16: mod_base = OTHER; note = guanosine-3'-phosphate
  modified_base 17: mod_base = OTHER; note = guanosine-3'-phosphate
  modified_base 18: mod_base = OTHER; note = adenosine-3'-phosphate
  modified_base 19: mod_base = OTHER; note = guanosine-3'-phosphate
  misc_feature 1..19: note = RNA
  misc_feature 20..21: note = DNA
ttcatcattttcttgggagtt

SEQ ID NO: 2536 - DNA, 21 bp, synthetic construct
  source 1..21: mol_type = other DNA
  modified_base 1: mod_base = OTHER; note = uridine-3'-phosphate
  modified_base 2: mod_base = OTHER; note = guanosine-3'-phosphate
  modified_base 3: mod_base = OTHER; note = adenosine-3'-phosphate
  modified_base 4: mod_base = OTHER; note = guanosine-3'-phosphate
  modified_base 5: mod_base = OTHER; note = adenosine-3'-phosphate
  modified_base 6: mod_base = OTHER; note = adenosine-3'-phosphate
  modified_base 7: mod_base = OTHER; note = uridine-3'-phosphate
  modified_base 8: mod_base = OTHER; note = uridine-3'-phosphate
  modified_base 9: mod_base = OTHER; note = uridine-3'-phosphate
  modified_base 10: mod_base = OTHER; note = cytidine-3'-phosphate
  modified_base 11: mod_base = OTHER; note = uridine-3'-phosphate
  modified_base 12: mod_base = OTHER; note = uridine-3'-phosphate
  modified_base 13: mod_base = OTHER; note = uridine-3'-phosphate
  modified_base 14: mod_base = OTHER; note = adenosine-3'-phosphate
  modified_base 15: mod_base = OTHER; note = cytidine-3'-phosphate
  modified_base 16: mod_base = OTHER; note = adenosine-3'-phosphate
  modified_base 17: mod_base = OTHER; note = adenosine-3'-phosphate
  modified_base 18: mod_base = OTHER; note = guanosine-3'-phosphate
  modified_base 19: mod_base = OTHER; note = guanosine-3'-phosphate
  misc_feature 1..19: note = RNA
  misc_feature 20..21: note = DNA
tgagaatttctttacaaggtt

SEQ ID NO: 2537 - DNA, 21 bp, synthetic construct
  source 1..21: mol_type = other DNA
  modified_base 1: mod_base = OTHER; note = uridine-3'-phosphate
  modified_base 2: mod_base = OTHER; note = cytidine-3'-phosphate
  modified_base 3: mod_base = OTHER; note = uridine-3'-phosphate
  modified_base 4: mod_base = OTHER; note = uridine-3'-phosphate
  modified_base 5: mod_base = OTHER; note = cytidine-3'-phosphate
  modified_base 6: mod_base = OTHER; note = uridine-3'-phosphate
  modified_base 7: mod_base = OTHER; note = uridine-3'-phosphate
  modified_base 8: mod_base = OTHER; note = guanosine-3'-phosphate
  modified_base 9: mod_base = OTHER; note = guanosine-3'-phosphate
  modified_base 10: mod_base = OTHER; note = cytidine-3'-phosphate
  modified_base 11: mod_base = OTHER; note = cytidine-3'-phosphate
  modified_base 12: mod_base = OTHER; note = uridine-3'-phosphate
  modified_base 13: mod_base = OTHER; note = guanosine-3'-phosphate
  modified_base 14: mod_base = OTHER; note = adenosine-3'-phosphate
  modified_base 15: mod_base = OTHER; note = guanosine-3'-phosphate
  modified_base 16: mod_base = OTHER; note = adenosine-3'-phosphate
  modified_base 17: mod_base = OTHER; note = adenosine-3'-phosphate
  modified_base 18: mod_base = OTHER; note = uridine-3'-phosphate
  modified_base 19: mod_base = OTHER; note = uridine-3'-phosphate
  misc_feature 1..19: note = RNA
  misc_feature 20..21: note = DNA
tcttcttggcctgagaatttt

SEQ ID NO: 2538 - DNA, 21 bp, synthetic construct
  source 1..21: mol_type = other DNA
  modified_base 1: mod_base = OTHER; note = uridine-3'-phosphate
  modified_base 2: mod_base = OTHER; note = uridine-3'-phosphate
  modified_base 3: mod_base = OTHER; note = uridine-3'-phosphate
  modified_base 4: mod_base = OTHER; note = guanosine-3'-phosphate
  modified_base 5: mod_base = OTHER; note = cytidine-3'-phosphate
  modified_base 6: mod_base = OTHER; note = adenosine-3'-phosphate
  modified_base 7: mod_base = OTHER; note = guanosine-3'-phosphate
  modified_base 8: mod_base = OTHER; note = cytidine-3'-phosphate
  modified_base 9: mod_base = OTHER; note = guanosine-3'-phosphate
  modified_base 10: mod_base = OTHER; note = uridine-3'-phosphate
  modified_base 11: mod_base = OTHER; note = uridine-3'-phosphate
  modified_base 12: mod_base = OTHER; note = cytidine-3'-phosphate
  modified_base 13: mod_base = OTHER; note = uridine-3'-phosphate
  modified_base 14: mod_base = OTHER; note = uridine-3'-phosphate
  modified_base 15: mod_base = OTHER; note = cytidine-3'-phosphate
  modified_base 16: mod_base = OTHER; note = uridine-3'-phosphate
  modified_base 17: mod_base = OTHER; note = uridine-3'-phosphate
  modified_base 18: mod_base = OTHER; note = guanosine-3'-phosphate
  modified_base 19: mod_base = OTHER; note = guanosine-3'-phosphate
  misc_feature 1..19: note = RNA
  misc_feature 20..21: note = DNA
tttgcagcgttcttcttggtt

SEQ ID NO: 2539 - DNA, 21 bp, synthetic construct
  source 1..21: mol_type = other DNA
  modified_base 1: mod_base = OTHER; note = uridine-3'-phosphate
  modified_base 2: mod_base = OTHER; note = cytidine-3'-phosphate
  modified_base 3: mod_base = OTHER; note = uridine-3'-phosphate
  modified_base 4: mod_base = OTHER; note = adenosine-3'-phosphate
  modified_base 5: mod_base = OTHER; note = uridine-3'-phosphate
  modified_base 6: mod_base = OTHER; note = cytidine-3'-phosphate
  modified_base 7: mod_base = OTHER; note = uridine-3'-phosphate
  modified_base 8: mod_base = OTHER; note = uridine-3'-phosphate
  modified_base 9: mod_base = OTHER; note = cytidine-3'-phosphate
  modified_base 10: mod_base = OTHER; note = uridine-3'-phosphate
  modified_base 11: mod_base = OTHER; note = uridine-3'-phosphate
  modified_base 12: mod_base = OTHER; note = uridine-3'-phosphate
  modified_base 13: mod_base = OTHER; note = uridine-3'-phosphate
  modified_base 14: mod_base = OTHER; note = guanosine-3'-phosphate
  modified_base 15: mod_base = OTHER; note = cytidine-3'-phosphate
  modified_base 16: mod_base = OTHER; note = adenosine-3'-phosphate
  modified_base 17: mod_base = OTHER; note = guanosine-3'-phosphate
  modified_base 18: mod_base = OTHER; note = cytidine-3'-phosphate
  modified_base 19: mod_base = OTHER; note = guanosine-3'-phosphate
  misc_feature 1..19: note = RNA
  misc_feature 20..21: note = DNA
tctatcttcttttgcagcgtt

SEQ ID NO: 2540 - DNA, 21 bp, synthetic construct
  source 1..21: mol_type = other DNA
  modified_base 1: mod_base = OTHER; note = uridine-3'-phosphate
  modified_base 2: mod_base = OTHER; note = adenosine-3'-phosphate
  modified_base 3: mod_base = OTHER; note = uridine-3'-phosphate
  modified_base 4: mod_base = OTHER; note = uridine-3'-phosphate
  modified_base 5: mod_base = OTHER; note = uridine-3'-phosphate
  modified_base 6: mod_base = OTHER; note = cytidine-3'-phosphate
  modified_base 7: mod_base = OTHER; note = uridine-3'-phosphate
  modified_base 8: mod_base = OTHER; note = uridine-3'-phosphate
  modified_base 9: mod_base = OTHER; note = cytidine-3'-phosphate
  modified_base 10: mod_base = OTHER; note = uridine-3'-phosphate
  modified_base 11: mod_base = OTHER; note = adenosine-3'-phosphate
  modified_base 12: mod_base = OTHER; note = uridine-3'-phosphate
  modified_base 13: mod_base = OTHER; note = cytidine-3'-phosphate
  modified_base 14: mod_base = OTHER; note = uridine-3'-phosphate
  modified_base 15: mod_base = OTHER; note = uridine-3'-phosphate
  modified_base 16: mod_base = OTHER; note = cytidine-3'-phosphate
  modified_base 17: mod_base = OTHER; note = uridine-3'-phosphate
  modified_base 18: mod_base = OTHER; note = uridine-3'-phosphate
  modified_base 19: mod_base = OTHER; note = uridine-3'-phosphate
  misc_feature 1..19: note = RNA
  misc_feature 20..21: note = DNA
tatttcttctatcttcttttt

SEQ ID NO: 2541 - DNA, 21 bp, synthetic construct
  source 1..21: mol_type = other DNA
  modified_base 1: mod_base = OTHER; note = adenosine-3'-phosphate
  modified_base 2: mod_base = OTHER; note = uridine-3'-phosphate
  modified_base 3: mod_base = OTHER; note = adenosine-3'-phosphate
  modified_base 4: mod_base = OTHER; note = uridine-3'-phosphate
  modified_base 5: mod_base = OTHER; note = uridine-3'-phosphate
  modified_base 6: mod_base = OTHER; note = uridine-3'-phosphate
  modified_base 7: mod_base = OTHER; note = adenosine-3'-phosphate
  modified_base 8: mod_base = OTHER; note = guanosine-3'-phosphate
  modified_base 9: mod_base = OTHER; note = cytidine-3'-phosphate
  modified_base 10: mod_base = OTHER; note = adenosine-3'-phosphate
  modified_base 11: mod_base = OTHER; note = guanosine-3'-phosphate
  modified_base 12: mod_base = OTHER; note = cytidine-3'-phosphate
  modified_base 13: mod_base = OTHER; note = uridine-3'-phosphate
  modified_base 14: mod_base = OTHER; note = adenosine-3'-phosphate
  modified_base 15: mod_base = OTHER; note = uridine-3'-phosphate
  modified_base 16: mod_base = OTHER; note = uridine-3'-phosphate
  modified_base 17: mod_base = OTHER; note = uridine-3'-phosphate
  modified_base 18: mod_base = OTHER; note = cytidine-3'-phosphate
  modified_base 19: mod_base = OTHER; note = uridine-3'-phosphate
  misc_feature 1..19: note = RNA
  misc_feature 20..21: note = DNA
atatttagcagctatttcttt

SEQ ID NO: 2542 - DNA, 21 bp, synthetic construct
  source 1..21: mol_type = other DNA
  modified_base 1: mod_base = OTHER; note = adenosine-3'-phosphate
  modified_base 2: mod_base = OTHER; note = adenosine-3'-phosphate
  modified_base 3: mod_base = OTHER; note = uridine-3'-phosphate
  modified_base 4: mod_base = OTHER; note = guanosine-3'-phosphate
  modified_base 5: mod_base = OTHER; note = uridine-3'-phosphate
  modified_base 6: mod_base = OTHER; note = uridine-3'-phosphate
  modified_base 7: mod_base = OTHER; note = uridine-3'-phosphate
  modified_base 8: mod_base = OTHER; note = adenosine-3'-phosphate
  modified_base 9: mod_base = OTHER; note = uridine-3'-phosphate
  modified_base 10: mod_base = OTHER; note = adenosine-3'-phosphate
  modified_base 11: mod_base = OTHER; note = uridine-3'-phosphate
  modified_base 12: mod_base = OTHER; note = uridine-3'-phosphate
  modified_base 13: mod_base = OTHER; note = uridine-3'-phosphate
  modified_base 14: mod_base = OTHER; note = adenosine-3'-phosphate
  modified_base 15: mod_base = OTHER; note = guanosine-3'-phosphate
  modified_base 16: mod_base = OTHER; note = cytidine-3'-phosphate
  modified_base 17: mod_base = OTHER; note = adenosine-3'-phosphate
  modified_base 18: mod_base = OTHER; note = guanosine-3'-phosphate
  modified_base 19: mod_base = OTHER; note = cytidine-3'-phosphate
  misc_feature 1..19: note = RNA
  misc_feature 20..21: note = DNA
aatgtttatatttagcagctt

SEQ ID NO: 2543 - DNA, 21 bp, synthetic construct
  source 1..21: mol_type = other DNA
  modified_base 1: mod_base = OTHER; note = uridine-3'-phosphate
  modified_base 2: mod_base = OTHER; note = uridine-3'-phosphate
  modified_base 3: mod_base = OTHER; note = uridine-3'-phosphate
  modified_base 4: mod_base = OTHER; note = cytidine-3'-phosphate
  modified_base 5: mod_base = OTHER; note = uridine-3'-phosphate
  modified_base 6: mod_base = OTHER; note = uridine-3'-phosphate
  modified_base 7: mod_base = OTHER; note = cytidine-3'-phosphate
  modified_base 8: mod_base = OTHER; note = adenosine-3'-phosphate
  modified_base 9: mod_base = OTHER; note = cytidine-3'-phosphate
  modified_base 10: mod_base = OTHER; note = uridine-3'-phosphate
  modified_base 11: mod_base = OTHER; note = adenosine-3'-phosphate
  modified_base 12: mod_base = OTHER; note = cytidine-3'-phosphate
  modified_base 13: mod_base = OTHER; note = uridine-3'-phosphate
  modified_base 14: mod_base = OTHER; note = guanosine-3'-phosphate
  modified_base 15: mod_base = OTHER; note = adenosine-3'-phosphate
  modified_base 16: mod_base = OTHER; note = adenosine-3'-phosphate
  modified_base 17: mod_base = OTHER; note = uridine-3'-phosphate
  modified_base 18: mod_base = OTHER; note = guanosine-3'-phosphate
  modified_base 19: mod_base = OTHER; note = uridine-3'-phosphate
  misc_feature 1..19: note = RNA
  misc_feature 20..21: note = DNA
tttcttcactactgaatgttt

SEQ ID NO: 2544 - DNA, 21 bp, synthetic construct
  source 1..21: mol_type = other DNA
  modified_base 1: mod_base = OTHER; note = adenosine-3'-phosphate
  modified_base 2: mod_base = OTHER; note = adenosine-3'-phosphate
  modified_base 3: mod_base = OTHER; note = cytidine-3'-phosphate
  modified_base 4: mod_base = OTHER; note = adenosine-3'-phosphate
  modified_base 5: mod_base = OTHER; note = adenosine-3'-phosphate
  modified_base 6: mod_base = OTHER; note = cytidine-3'-phosphate
  modified_base 7: mod_base = OTHER; note = adenosine-3'-phosphate
  modified_base 8: mod_base = OTHER; note = uridine-3'-phosphate
  modified_base 9: mod_base = OTHER; note = uridine-3'-phosphate
  modified_base 10: mod_base = OTHER; note = uridine-3'-phosphate
  modified_base 11: mod_base = OTHER; note = cytidine-3'-phosphate
  modified_base 12: mod_base = OTHER; note = uridine-3'-phosphate
  modified_base 13: mod_base = OTHER; note = uridine-3'-phosphate
  modified_base 14: mod_base = OTHER; note = cytidine-3'-phosphate
  modified_base 15: mod_base = OTHER; note = adenosine-3'-phosphate
  modified_base 16: mod_base = OTHER; note = cytidine-3'-phosphate
  modified_base 17: mod_base = OTHER; note = uridine-3'-phosphate
  modified_base 18: mod_base = OTHER; note = adenosine-3'-phosphate
  modified_base 19: mod_base = OTHER; note = cytidine-3'-phosphate
  misc_feature 1..19: note = RNA
  misc_feature 20..21: note = DNA
aacaacatttcttcactactt

SEQ ID NO: 2545 - DNA, 21 bp, synthetic construct
  source 1..21: mol_type = other DNA
  modified_base 1: mod_base = OTHER; note = cytidine-3'-phosphate
  modified_base 2: mod_base = OTHER; note = uridine-3'-phosphate
  modified_base 3: mod_base = OTHER; note = cytidine-3'-phosphate
  modified_base 4: mod_base = OTHER; note = cytidine-3'-phosphate
  modified_base 5: mod_base = OTHER; note = adenosine-3'-phosphate
  modified_base 6: mod_base = OTHER; note = uridine-3'-phosphate
  modified_base 7: mod_base = OTHER; note = cytidine-3'-phosphate
  modified_base 8: mod_base = OTHER; note = guanosine-3'-phosphate
  modified_base 9: mod_base = OTHER; note = uridine-3'-phosphate
  modified_base 10: mod_base = OTHER; note = adenosine-3'-phosphate
  modified_base 11: mod_base = OTHER; note = adenosine-3'-phosphate
  modified_base 12: mod_base = OTHER; note = cytidine-3'-phosphate
  modified_base 13: mod_base = OTHER; note = adenosine-3'-phosphate
  modified_base 14: mod_base = OTHER; note = adenosine-3'-phosphate
  modified_base 15: mod_base = OTHER; note = cytidine-3'-phosphate
  modified_base 16: mod_base = OTHER; note = adenosine-3'-phosphate
  modified_base 17: mod_base = OTHER; note = uridine-3'-phosphate
  modified_base 18: mod_base = OTHER; note = uridine-3'-phosphate
  modified_base 19: mod_base = OTHER; note = uridine-3'-phosphate
  misc_feature 1..19: note = RNA
  misc_feature 20..21: note = DNA
ctccatcgtaacaacattttt

SEQ ID NO: 2546 - DNA, 21 bp, synthetic construct
  source 1..21: mol_type = other DNA
  modified_base 1: mod_base = OTHER; note = adenosine-3'-phosphate
  modified_base 2: mod_base = OTHER; note = uridine-3'-phosphate
  modified_base 3: mod_base = OTHER; note = uridine-3'-phosphate
  modified_base 4: mod_base = OTHER; note = adenosine-3'-phosphate
  modified_base 5: mod_base = OTHER; note = adenosine-3'-phosphate
  modified_base 6: mod_base = OTHER; note = cytidine-3'-phosphate
  modified_base 7: mod_base = OTHER; note = guanosine-3'-phosphate
  modified_base 8: mod_base = OTHER; note = cytidine-3'-phosphate
  modified_base 9: mod_base = OTHER; note = adenosine-3'-phosphate
  modified_base 10: mod_base = OTHER; note = guanosine-3'-phosphate
  modified_base 11: mod_base = OTHER; note = guanosine-3'-phosphate
  modified_base 12: mod_base = OTHER; note = cytidine-3'-phosphate
  modified_base 13: mod_base = OTHER; note = uridine-3'-phosphate
  modified_base 14: mod_base = OTHER; note = cytidine-3'-phosphate
  modified_base 15: mod_base = OTHER; note = cytidine-3'-phosphate
  modified_base 16: mod_base = OTHER; note = adenosine-3'-phosphate
  modified_base 17: mod_base = OTHER; note = uridine-3'-phosphate
  modified_base 18: mod_base = OTHER; note = cytidine-3'-phosphate
  modified_base 19: mod_base = OTHER; note = guanosine-3'-phosphate
  misc_feature 1..19: note = RNA
  misc_feature 20..21: note = DNA
attaacgcaggctccatcgtt

SEQ ID NO: 2547 - DNA, 21 bp, synthetic construct
  source 1..21: mol_type = other DNA
  modified_base 1: mod_base = OTHER; note = guanosine-3'-phosphate
  modified_base 2: mod_base = OTHER; note = guanosine-3'-phosphate
  modified_base 3: mod_base = OTHER; note = uridine-3'-phosphate
  modified_base 4: mod_base = OTHER; note = uridine-3'-phosphate
  modified_base 5: mod_base = OTHER; note = uridine-3'-phosphate
  modified_base 6: mod_base = OTHER; note = cytidine-3'-phosphate
  modified_base 7: mod_base = OTHER; note = adenosine-3'-phosphate
  modified_base 8: mod_base = OTHER; note = uridine-3'-phosphate
  modified_base 9: mod_base = OTHER; note = cytidine-3'-phosphate
  modified_base 10: mod_base = OTHER; note = adenosine-3'-phosphate
  modified_base 11: mod_base = OTHER; note = uridine-3'-phosphate
  modified_base 12: mod_base = OTHER; note = uridine-3'-phosphate
  modified_base 13: mod_base = OTHER; note = adenosine-3'-phosphate
  modified_base 14: mod_base = OTHER; note = uridine-3'-phosphate
  modified_base 15: mod_base = OTHER; note = uridine-3'-phosphate
  modified_base 16: mod_base = OTHER; note = adenosine-3'-phosphate
  modified_base 17: mod_base = OTHER; note = adenosine-3'-phosphate
  modified_base 18: mod_base = OTHER; note = cytidine-3'-phosphate
  modified_base 19: mod_base = OTHER; note = guanosine-3'-phosphate
  misc_feature 1..19: note = RNA
  misc_feature 20..21: note = DNA
ggtttcatcattattaacgtt

SEQ ID NO: 2548 - DNA, 21 bp, synthetic construct
  source 1..21: mol_type = other DNA
  modified_base 1: mod_base = OTHER; note = uridine-3'-phosphate
  modified_base 2: mod_base = OTHER; note = guanosine-3'-phosphate
  modified_base 3: mod_base = OTHER; note = cytidine-3'-phosphate
  modified_base 4: mod_base = OTHER; note = uridine-3'-phosphate
  modified_base 5: mod_base = OTHER; note = cytidine-3'-phosphate
  modified_base 6: mod_base = OTHER; note = adenosine-3'-phosphate
  modified_base 7: mod_base = OTHER; note = cytidine-3'-phosphate
  modified_base 8: mod_base = OTHER; note = adenosine-3'-phosphate
  modified_base 9: mod_base = OTHER; note = guanosine-3'-phosphate
  modified_base 10: mod_base = OTHER; note = guanosine-3'-phosphate
  modified_base 11: mod_base = OTHER; note = uridine-3'-phosphate
  modified_base 12: mod_base = OTHER; note = uridine-3'-phosphate
  modified_base 13: mod_base = OTHER; note = uridine-3'-phosphate
  modified_base 14: mod_base = OTHER; note = cytidine-3'-phosphate
  modified_base 15: mod_base = OTHER; note = adenosine-3'-phosphate
  modified_base 16: mod_base = OTHER; note = uridine-3'-phosphate
  modified_base 17: mod_base = OTHER; note = cytidine-3'-phosphate
  modified_base 18: mod_base = OTHER; note = adenosine-3'-phosphate
  modified_base 19: mod_base = OTHER; note = uridine-3'-phosphate
  misc_feature 1..19: note = RNA
  misc_feature 20..21: note = DNA
tgctcacaggtttcatcattt

SEQ ID NO: 2549 - DNA, 21 bp, synthetic construct
  source 1..21: mol_type = other DNA
  modified_base 1: mod_base = OTHER; note = uridine-3'-phosphate
  modified_base 2: mod_base = OTHER; note = guanosine-3'-phosphate
  modified_base 3: mod_base = OTHER; note = cytidine-3'-phosphate
  modified_base 4: mod_base = OTHER; note = adenosine-3'-phosphate
  modified_base 5: mod_base = OTHER; note = guanosine-3'-phosphate
  modified_base 6: mod_base = OTHER; note = cytidine-3'-phosphate
  modified_base 7: mod_base = OTHER; note = uridine-3'-phosphate
  modified_base 8: mod_base = OTHER; note = cytidine-3'-phosphate
  modified_base 9: mod_base = OTHER; note = guanosine-3'-phosphate
  modified_base 10: mod_base = OTHER; note = cytidine-3'-phosphate
  modified_base 11: mod_base = OTHER; note = uridine-3'-phosphate
  modified_base 12: mod_base = OTHER; note = guanosine-3'-phosphate
  modified_base 13: mod_base = OTHER; note = cytidine-3'-phosphate
  modified_base 14: mod_base = OTHER; note = uridine-3'-phosphate
  modified_base 15: mod_base = OTHER; note = cytidine-3'-phosphate
  modified_base 16: mod_base = OTHER; note = adenosine-3'-phosphate
  modified_base 17: mod_base = OTHER; note = cytidine-3'-phosphate
  modified_base 18: mod_base = OTHER; note = adenosine-3'-phosphate
  modified_base 19: mod_base = OTHER; note = guanosine-3'-phosphate
  misc_feature 1..19: note = RNA
  misc_feature 20..21: note = DNA
tgcagctcgctgctcacagtt

SEQ ID NO: 2550 - DNA, 21 bp, synthetic construct
  source 1..21: mol_type = other DNA
  modified_base 1: mod_base = OTHER; note = adenosine-3'-phosphate
  modified_base 2: mod_base = OTHER; note = adenosine-3'-phosphate
  modified_base 3: mod_base = OTHER; note = cytidine-3'-phosphate
  modified_base 4: mod_base = OTHER; note = uridine-3'-phosphate
  modified_base 5: mod_base = OTHER; note = adenosine-3'-phosphate
  modified_base 6: mod_base = OTHER; note = adenosine-3'-phosphate
  modified_base 7: mod_base = OTHER; note = uridine-3'-phosphate
  modified_base 8: mod_base = OTHER; note = cytidine-3'-phosphate
  modified_base 9: mod_base = OTHER; note = cytidine-3'-phosphate
  modified_base 10: mod_base = OTHER; note = guanosine-3'-phosphate
  modified_base 11: mod_base = OTHER; note = uridine-3'-phosphate
  modified_base 12: mod_base = OTHER; note = guanosine-3'-phosphate
  modified_base 13: mod_base = OTHER; note = cytidine-3'-phosphate
  modified_base 14: mod_base = OTHER; note = adenosine-3'-phosphate
  modified_base 15: mod_base = OTHER; note = guanosine-3'-phosphate
  modified_base 16: mod_base = OTHER; note = cytidine-3'-phosphate
  modified_base 17: mod_base = OTHER; note = uridine-3'-phosphate
  modified_base 18: mod_base = OTHER; note = cytidine-3'-phosphate
  modified_base 19: mod_base = OTHER; note = guanosine-3'-phosphate
  misc_feature 1..19: note = RNA
  misc_feature 20..21: note = DNA
aactaatccgtgcagctcgtt

SEQ ID NO: 2551 - DNA, 21 bp, synthetic construct
  source 1..21: mol_type = other DNA
  modified_base 1: mod_base = OTHER; note = cytidine-3'-phosphate
  modified_base 2: mod_base = OTHER; note = uridine-3'-phosphate
  modified_base 3: mod_base = OTHER; note = uridine-3'-phosphate
  modified_base 4: mod_base = OTHER; note = guanosine-3'-phosphate
  modified_base 5: mod_base = OTHER; note = guanosine-3'-phosphate
  modified_base 6: mod_base = OTHER; note = cytidine-3'-phosphate
  modified_base 7: mod_base = OTHER; note = cytidine-3'-phosphate
  modified_base 8: mod_base = OTHER; note = cytidine-3'-phosphate
  modified_base 9: mod_base = OTHER; note = uridine-3'-phosphate
  modified_base 10: mod_base = OTHER; note = adenosine-3'-phosphate
  modified_base 11: mod_base = OTHER; note = adenosine-3'-phosphate
  modified_base 12: mod_base = OTHER; note = adenosine-3'-phosphate
  modified_base 13: mod_base = OTHER; note = cytidine-3'-phosphate
  modified_base 14: mod_base = OTHER; note = uridine-3'-phosphate
  modified_base 15: mod_base = OTHER; note = adenosine-3'-phosphate
  modified_base 16: mod_base = OTHER; note = adenosine-3'-phosphate
  modified_base 17: mod_base = OTHER; note = uridine-3'-phosphate
  modified_base 18: mod_base = OTHER; note = cytidine-3'-phosphate
  modified_base 19: mod_base = OTHER; note = cytidine-3'-phosphate
  misc_feature 1..19: note = RNA
  misc_feature 20..21: note = DNA
cttggccctaaactaatcctt

SEQ ID NO: 2552 - DNA, 21 bp, synthetic construct
  source 1..21: mol_type = other DNA
  modified_base 1: mod_base = OTHER; note = cytidine-3'-phosphate
  modified_base 2: mod_base = OTHER; note = uridine-3'-phosphate
  modified_base 3: mod_base = OTHER; note = uridine-3'-phosphate
  modified_base 4: mod_base = OTHER; note = uridine-3'-phosphate
  modified_base 5: mod_base = OTHER; note = guanosine-3'-phosphate
  modified_base 6: mod_base = OTHER; note = adenosine-3'-phosphate
  modified_base 7: mod_base = OTHER; note = uridine-3'-phosphate
  modified_base 8: mod_base = OTHER; note = guanosine-3'-phosphate
  modified_base 9: mod_base = OTHER; note = cytidine-3'-phosphate
  modified_base 10: mod_base = OTHER; note = adenosine-3'-phosphate
  modified_base 11: mod_base = OTHER; note = uridine-3'-phosphate
  modified_base 12: mod_base = OTHER; note = cytidine-3'-phosphate
  modified_base 13: mod_base = OTHER; note = uridine-3'-phosphate
  modified_base 14: mod_base = OTHER; note = uridine-3'-phosphate
  modified_base 15: mod_base = OTHER; note = guanosine-3'-phosphate
  modified_base 16: mod_base = OTHER; note = guanosine-3'-phosphate
  modified_base 17: mod_base = OTHER; note = cytidine-3'-phosphate
  modified_base 18: mod_base = OTHER; note = cytidine-3'-phosphate
  modified_base 19: mod_base = OTHER; note = cytidine-3'-phosphate
  misc_feature 1..19: note = RNA
  misc_feature 20..21: note = DNA
ctttgatgcatcttggccctt

SEQ ID NO: 2553 - DNA, 21 bp, synthetic construct
  source 1..21: mol_type = other DNA
  modified_base 1: mod_base = OTHER; note = uridine-3'-phosphate
  modified_base 2: mod_base = OTHER; note = uridine-3'-phosphate
  modified_base 3: mod_base = OTHER; note = cytidine-3'-phosphate
  modified_base 4: mod_base = OTHER; note = adenosine-3'-phosphate
  modified_base 5: mod_base = OTHER; note = guanosine-3'-phosphate
  modified_base 6: mod_base = OTHER; note = uridine-3'-phosphate
  modified_base 7: mod_base = OTHER; note = guanosine-3'-phosphate
  modified_base 8: mod_base = OTHER; note = adenosine-3'-phosphate
  modified_base 9: mod_base = OTHER; note = adenosine-3'-phosphate
  modified_base 10: mod_base = OTHER; note = adenosine-3'-phosphate
  modified_base 11: mod_base = OTHER; note = guanosine-3'-phosphate
  modified_base 12: mod_base = OTHER; note = cytidine-3'-phosphate
  modified_base 13: mod_base = OTHER; note = uridine-3'-phosphate
  modified_base 14: mod_base = OTHER; note = uridine-3'-phosphate
  modified_base 15: mod_base = OTHER; note = uridine-3'-phosphate
  modified_base 16: mod_base = OTHER; note = guanosine-3'-phosphate
  modified_base 17: mod_base = OTHER; note = adenosine-3'-phosphate
  modified_base 18: mod_base = OTHER; note = uridine-3'-phosphate
  modified_base 19: mod_base = OTHER; note = guanosine-3'-phosphate
  misc_feature 1..19: note = RNA
  misc_feature 20..21: note = DNA
ttcagtgaaagctttgatgtt

SEQ ID NO: 2554 - DNA, 21 bp, synthetic construct
  source 1..21: mol_type = other DNA
  modified_base 1: mod_base = OTHER; note = cytidine-3'-phosphate
  modified_base 2: mod_base = OTHER; note = adenosine-3'-phosphate
  modified_base 3: mod_base = OTHER; note = cytidine-3'-phosphate
  modified_base 4: mod_base = OTHER; note = adenosine-3'-phosphate
  modified_base 5: mod_base = OTHER; note = adenosine-3'-phosphate
  modified_base 6: mod_base = OTHER; note = cytidine-3'-phosphate
  modified_base 7: mod_base = OTHER; note = adenosine-3'-phosphate
  modified_base 8: mod_base = OTHER; note = uridine-3'-phosphate
  modified_base 9: mod_base = OTHER; note = uridine-3'-phosphate
  modified_base 10: mod_base = OTHER; note = cytidine-3'-phosphate
  modified_base 11: mod_base = OTHER; note = adenosine-3'-phosphate
  modified_base 12: mod_base = OTHER; note = guanosine-3'-phosphate
  modified_base 13: mod_base = OTHER; note = uridine-3'-phosphate
  modified_base 14: mod_base = OTHER; note = guanosine-3'-phosphate
  modified_base 15: mod_base = OTHER; note = adenosine-3'-phosphate
  modified_base 16: mod_base = OTHER; note = adenosine-3'-phosphate
  modified_base 17: mod_base = OTHER; note = adenosine-3'-phosphate
  modified_base 18: mod_base = OTHER; note = guanosine-3'-phosphate
  modified_base 19: mod_base = OTHER; note = cytidine-3'-phosphate
  misc_feature 1..19: note = RNA
  misc_feature 20..21: note = DNA
cacaacattcagtgaaagctt

SEQ ID NO: 2555 - DNA, 21 bp, synthetic construct
  source 1..21: mol_type = other DNA
  modified_base 1: mod_base = OTHER; note = cytidine-3'-phosphate
  modified_base 2: mod_base = OTHER; note = uridine-3'-phosphate
  modified_base 3: mod_base = OTHER; note = uridine-3'-phosphate
  modified_base 4: mod_base = OTHER; note = guanosine-3'-phosphate
  modified_base 5: mod_base = OTHER; note = cytidine-3'-phosphate
  modified_base 6: mod_base = OTHER; note = guanosine-3'-phosphate
  modified_base 7: mod_base = OTHER; note = adenosine-3'-phosphate
  modified_base 8: mod_base = OTHER; note = cytidine-3'-phosphate
  modified_base 9: mod_base = OTHER; note = guanosine-3'-phosphate
  modified_base 10: mod_base = OTHER; note = adenosine-3'-phosphate
  modified_base 11: mod_base = OTHER; note = cytidine-3'-phosphate
  modified_base 12: mod_base = OTHER; note = adenosine-3'-phosphate
  modified_base 13: mod_base = OTHER; note = cytidine-3'-phosphate
  modified_base 14: mod_base = OTHER; note = adenosine-3'-phosphate
  modified_base 15: mod_base = OTHER; note = adenosine-3'-phosphate
  modified_base 16: mod_base = OTHER; note = cytidine-3'-phosphate
  modified_base 17: mod_base = OTHER; note = adenosine-3'-phosphate
  modified_base 18: mod_base = OTHER; note = uridine-3'-phosphate
  modified_base 19: mod_base = OTHER; note = uridine-3'-phosphate
  misc_feature 1..19: note = RNA
  misc_feature 20..21: note = DNA
cttgcgacgacacaacatttt

SEQ ID NO: 2556 - DNA, 21 bp, synthetic construct
  source 1..21: mol_type = other DNA
  modified_base 1: mod_base = OTHER; note = adenosine-3'-phosphate
  modified_base 2: mod_base = OTHER; note = cytidine-3'-phosphate
  modified_base 3: mod_base = OTHER; note = guanosine-3'-phosphate
  modified_base 4: mod_base = OTHER; note = guanosine-3'-phosphate
  modified_base 5: mod_base = OTHER; note = adenosine-3'-phosphate
  modified_base 6: mod_base = OTHER; note = guanosine-3'-phosphate
  modified_base 7: mod_base = OTHER; note = cytidine-3'-phosphate
  modified_base 8: mod_base = OTHER; note = uridine-3'-phosphate
  modified_base 9: mod_base = OTHER; note = guanosine-3'-phosphate
  modified_base 10: mod_base = OTHER; note = guanosine-3'-phosphate
  modified_base 11: mod_base = OTHER; note = cytidine-3'-phosphate
  modified_base 12: mod_base = OTHER; note = uridine-3'-phosphate
  modified_base 13: mod_base = OTHER; note = uridine-3'-phosphate
  modified_base 14: mod_base = OTHER; note = guanosine-3'-phosphate
  modified_base 15: mod_base = OTHER; note = cytidine-3'-phosphate
  modified_base 16: mod_base = OTHER; note = guanosine-3'-phosphate
  modified_base 17: mod_base = OTHER; note = adenosine-3'-phosphate
  modified_base 18: mod_base = OTHER; note = cytidine-3'-phosphate
  modified_base 19: mod_base = OTHER; note = guanosine-3'-phosphate
  misc_feature 1..19: note = RNA
  misc_feature 20..21: note = DNA
acggagctggcttgcgacgtt

SEQ ID NO: 2557 - DNA, 21 bp, synthetic construct
  source 1..21: mol_type = other DNA
  modified_base 1: mod_base = OTHER; note = adenosine-3'-phosphate
  modified_base 2: mod_base = OTHER; note = guanosine-3'-phosphate
  modified_base 3: mod_base = OTHER; note = adenosine-3'-phosphate
  modified_base 4: mod_base = OTHER; note = guanosine-3'-phosphate
  modified_base 5: mod_base = OTHER; note = adenosine-3'-phosphate
  modified_base 6: mod_base = OTHER; note = uridine-3'-phosphate
  modified_base 7: mod_base = OTHER; note = adenosine-3'-phosphate
  modified_base 8: mod_base = OTHER; note = uridine-3'-phosphate
  modified_base 9: mod_base = OTHER; note = uridine-3'-phosphate
  modified_base 10: mod_base = OTHER; note = adenosine-3'-phosphate
  modified_base 11: mod_base = OTHER; note = guanosine-3'-phosphate
  modified_base 12: mod_base = OTHER; note = cytidine-3'-phosphate
  modified_base 13: mod_base = OTHER; note = adenosine-3'-phosphate
  modified_base 14: mod_base = OTHER; note = cytidine-3'-phosphate
  modified_base 15: mod_base = OTHER; note = guanosine-3'-phosphate
  modified_base 16: mod_base = OTHER; note = guanosine-3'-phosphate
  modified_base 17: mod_base = OTHER; note = adenosine-3'-phosphate
  modified_base 18: mod_base = OTHER; note = guanosine-3'-phosphate
  modified_base 19: mod_base = OTHER; note = cytidine-3'-phosphate
  misc_feature 1..19: note = RNA
  misc_feature 20..21: note = DNA
agagatattagcacggagctt

SEQ ID NO: 2558 - DNA, 21 bp, synthetic construct
  source 1..21: mol_type = other DNA
  modified_base 1: mod_base = OTHER; note = uridine-3'-phosphate
  modified_base 2: mod_base = OTHER; note = cytidine-3'-phosphate
  modified_base 3: mod_base = OTHER; note = uridine-3'-phosphate
  modified_base 4: mod_base = OTHER; note = uridine-3'-phosphate
  modified_base 5: mod_base = OTHER; note = uridine-3'-phosphate
  modified_base 6: mod_base = OTHER; note = adenosine-3'-phosphate
  modified_base 7: mod_base = OTHER; note = uridine-3'-phosphate
  modified_base 8: mod_base = OTHER; note = guanosine-3'-phosphate
  modified_base 9: mod_base = OTHER; note = adenosine-3'-phosphate
  modified_base 10: mod_base = OTHER; note = guanosine-3'-phosphate
  modified_base 11: mod_base = OTHER; note = adenosine-3'-phosphate
  modified_base 12: mod_base = OTHER; note = guanosine-3'-phosphate
  modified_base 13: mod_base = OTHER; note = adenosine-3'-phosphate
  modified_base 14: mod_base = OTHER; note = uridine-3'-phosphate
  modified_base 15: mod_base = OTHER; note = adenosine-3'-phosphate
  modified_base 16: mod_base = OTHER; note = uridine-3'-phosphate
  modified_base 17: mod_base = OTHER; note = uridine-3'-phosphate
  modified_base 18: mod_base = OTHER; note = adenosine-3'-phosphate
  modified_base 19: mod_base = OTHER; note = guanosine-3'-phosphate
  misc_feature 1..19: note = RNA
  misc_feature 20..21: note = DNA
tctttatgagagatattagtt

SEQ ID NO: 2559 - DNA, 21 bp, synthetic construct
  source 1..21: mol_type = other DNA
  modified_base 1: mod_base = OTHER; note = uridine-3'-phosphate
  modified_base 2: mod_base = OTHER; note = uridine-3'-phosphate
  modified_base 3: mod_base = OTHER; note = cytidine-3'-phosphate
  modified_base 4: mod_base = OTHER; note = cytidine-3'-phosphate
  modified_base 5: mod_base = OTHER; note = cytidine-3'-phosphate
  modified_base 6: mod_base = OTHER; note = adenosine-3'-phosphate
  modified_base 7: mod_base = OTHER; note = adenosine-3'-phosphate
  modified_base 8: mod_base = OTHER; note = uridine-3'-phosphate
  modified_base 9: mod_base = OTHER; note = uridine-3'-phosphate
  modified_base 10: mod_base = OTHER; note = guanosine-3'-phosphate
  modified_base 11: mod_base = OTHER; note = cytidine-3'-phosphate
  modified_base 12: mod_base = OTHER; note = adenosine-3'-phosphate
  modified_base 13: mod_base = OTHER; note = uridine-3'-phosphate
  modified_base 14: mod_base = OTHER; note = guanosine-3'-phosphate
  modified_base 15: mod_base = OTHER; note = uridine-3'-phosphate
  modified_base 16: mod_base = OTHER; note = cytidine-3'-phosphate
  modified_base 17: mod_base = OTHER; note = uridine-3'-phosphate
  modified_base 18: mod_base = OTHER; note = uridine-3'-phosphate
  modified_base 19: mod_base = OTHER; note = uridine-3'-phosphate
  misc_feature 1..19: note = RNA
  misc_feature 20..21: note = DNA
ttcccaattgcatgtcttttt

SEQ ID NO: 2560 - DNA, 21 bp, synthetic construct
  source 1..21: mol_type = other DNA
  modified_base 1: mod_base = OTHER; note = uridine-3'-phosphate
  modified_base 2: mod_base = OTHER; note = guanosine-3'-phosphate
  modified_base 3: mod_base = OTHER; note = uridine-3'-phosphate
  modified_base 4: mod_base = OTHER; note = guanosine-3'-phosphate
  modified_base 5: mod_base = OTHER; note = uridine-3'-phosphate
  modified_base 6: mod_base = OTHER; note = adenosine-3'-phosphate
  modified_base 7: mod_base = OTHER; note = guanosine-3'-phosphate
  modified_base 8: mod_base = OTHER; note = cytidine-3'-phosphate
  modified_base 9: mod_base = OTHER; note = cytidine-3'-phosphate
  modified_base 10: mod_base = OTHER; note = uridine-3'-phosphate
  modified_base 11: mod_base = OTHER; note = uridine-3'-phosphate
  modified_base 12: mod_base = OTHER; note = cytidine-3'-phosphate
  modified_base 13: mod_base = OTHER; note = cytidine-3'-phosphate
  modified_base 14: mod_base = OTHER; note = cytidine-3'-phosphate
  modified_base 15: mod_base = OTHER; note = adenosine-3'-phosphate
  modified_base 16: mod_base = OTHER; note = adenosine-3'-phosphate
  modified_base 17: mod_base = OTHER; note = uridine-3'-phosphate
  modified_base 18: mod_base = OTHER; note = uridine-3'-phosphate
  modified_base 19: mod_base = OTHER; note = guanosine-3'-phosphate
  misc_feature 1..19: note = RNA
  misc_feature 20..21: note = DNA
tgtgtagccttcccaattgtt

SEQ ID NO: 2561 - DNA, 21 bp, synthetic construct
  source 1..21: mol_type = other DNA
  modified_base 1: mod_base = OTHER; note = cytidine-3'-phosphate
  modified_base 2: mod_base = OTHER; note = adenosine-3'-phosphate
  modified_base 3: mod_base = OTHER; note = guanosine-3'-phosphate
  modified_base 4: mod_base = OTHER; note = guanosine-3'-phosphate
  modified_base 5: mod_base = OTHER; note = guanosine-3'-phosphate
  modified_base 6: mod_base = OTHER; note = uridine-3'-phosphate
  modified_base 7: mod_base = OTHER; note = cytidine-3'-phosphate
  modified_base 8: mod_base = OTHER; note = uridine-3'-phosphate
  modified_base 9: mod_base = OTHER; note = uridine-3'-phosphate
  modified_base 10: mod_base = OTHER; note = cytidine-3'-phosphate
  modified_base 11: mod_base = OTHER; note = adenosine-3'-phosphate
  modified_base 12: mod_base = OTHER; note = uridine-3'-phosphate
  modified_base 13: mod_base = OTHER; note = guanosine-3'-phosphate
  modified_base 14: mod_base = OTHER; note = uridine-3'-phosphate
  modified_base 15: mod_base = OTHER; note = guanosine-3'-phosphate
  modified_base 16: mod_base = OTHER; note = uridine-3'-phosphate
  modified_base 17: mod_base = OTHER; note = adenosine-3'-phosphate
  modified_base 18: mod_base = OTHER; note = guanosine-3'-phosphate
  modified_base 19: mod_base = OTHER; note = cytidine-3'-phosphate
  misc_feature 1..19: note = RNA
  misc_feature 20..21: note = DNA
cagggtcttcatgtgtagctt

SEQ ID NO: 2562 - DNA, 21 bp, synthetic construct
  source 1..21: mol_type = other DNA
  modified_base 1: mod_base = OTHER; note = uridine-3'-phosphate
  modified_base 2: mod_base = OTHER; note = guanosine-3'-phosphate
  modified_base 3: mod_base = OTHER; note = guanosine-3'-phosphate
  modified_base 4: mod_base = OTHER; note = uridine-3'-phosphate
  modified_base 5: mod_base = OTHER; note = adenosine-3'-phosphate
  modified_base 6: mod_base = OTHER; note = adenosine-3'-phosphate
  modified_base 7: mod_base = OTHER; note = cytidine-3'-phosphate
  modified_base 8: mod_base = OTHER; note = adenosine-3'-phosphate
  modified_base 9: mod_base = OTHER; note = guanosine-3'-phosphate
  modified_base 10: mod_base = OTHER; note = guanosine-3'-phosphate
  modified_base 11: mod_base = OTHER; note = guanosine-3'-phosphate
  modified_base 12: mod_base = OTHER; note = uridine-3'-phosphate
  modified_base 13: mod_base = OTHER; note = cytidine-3'-phosphate
  modified_base 14: mod_base = OTHER; note = uridine-3'-phosphate
  modified_base 15: mod_base = OTHER; note = uridine-3'-phosphate
  modified_base 16: mod_base = OTHER; note = cytidine-3'-phosphate
  modified_base 17: mod_base = OTHER; note = adenosine-3'-phosphate
  modified_base 18: mod_base = OTHER; note = uridine-3'-phosphate
  modified_base 19: mod_base = OTHER; note = guanosine-3'-phosphate
  misc_feature 1..19: note = RNA
  misc_feature 20..21: note = DNA
tggtaacagggtcttcatgtt

SEQ ID NO: 2563 - DNA, 21 bp, synthetic construct
  source 1..21: mol_type = other DNA
  modified_base 1: mod_base = OTHER; note = uridine-3'-phosphate
  modified_base 2: mod_base = OTHER; note = cytidine-3'-phosphate
  modified_base 3: mod_base = OTHER; note = uridine-3'-phosphate
  modified_base 4: mod_base = OTHER; note = guanosine-3'-phosphate
  modified_base 5: mod_base = OTHER; note = guanosine-3'-phosphate
  modified_base 6: mod_base = OTHER; note = cytidine-3'-phosphate
  modified_base 7: mod_base = OTHER; note = uridine-3'-phosphate
  modified_base 8: mod_base = OTHER; note = uridine-3'-phosphate
  modified_base 9: mod_base = OTHER; note = guanosine-3'-phosphate
  modified_base 10: mod_base = OTHER; note = cytidine-3'-phosphate
  modified_base 11: mod_base = OTHER; note = uridine-3'-phosphate
  modified_base 12: mod_base = OTHER; note = uridine-3'-phosphate
  modified_base 13: mod_base = OTHER; note = adenosine-3'-phosphate
  modified_base 14: mod_base = OTHER; note = cytidine-3'-phosphate
  modified_base 15: mod_base = OTHER; note = uridine-3'-phosphate
  modified_base 16: mod_base = OTHER; note = guanosine-3'-phosphate
  modified_base 17: mod_base = OTHER; note = guanosine-3'-phosphate
  modified_base 18: mod_base = OTHER; note = uridine-3'-phosphate
  modified_base 19: mod_base = OTHER; note = adenosine-3'-phosphate
  misc_feature 1..19: note = RNA
  misc_feature 20..21: note = DNA
tctggcttgcttactggtatt

SEQ ID NO: 2564 - DNA, 21 bp, synthetic construct
  source 1..21: mol_type = other DNA
  modified_base 1: mod_base = OTHER; note = uridine-3'-phosphate
  modified_base 2: mod_base = OTHER; note = cytidine-3'-phosphate
  modified_base 3: mod_base = OTHER; note = cytidine-3'-phosphate
  modified_base 4: mod_base = OTHER; note = guanosine-3'-phosphate
  modified_base 5: mod_base = OTHER; note = adenosine-3'-phosphate
  modified_base 6: mod_base = OTHER; note = adenosine-3'-phosphate
  modified_base 7: mod_base = OTHER; note = uridine-3'-phosphate
  modified_base 8: mod_base = OTHER; note = uridine-3'-phosphate
  modified_base 9: mod_base = OTHER; note = uridine-3'-phosphate
  modified_base 10: mod_base = OTHER; note = cytidine-3'-phosphate
  modified_base 11: mod_base = OTHER; note = uridine-3'-phosphate
  modified_base 12: mod_base = OTHER; note = guanosine-3'-phosphate
  modified_base 13: mod_base = OTHER; note = guanosine-3'-phosphate
  modified_base 14: mod_base = OTHER; note = cytidine-3'-phosphate
  modified_base 15: mod_base = OTHER; note = uridine-3'-phosphate
  modified_base 16: mod_base = OTHER; note = uridine-3'-phosphate
  modified_base 17: mod_base = OTHER; note = guanosine-3'-phosphate
  modified_base 18: mod_base = OTHER; note = cytidine-3'-phosphate
  modified_base 19: mod_base = OTHER; note = uridine-3'-phosphate
  misc_feature 1..19: note = RNA
  misc_feature 20..21: note = DNA
tccgaatttctggcttgcttt

SEQ ID NO: 2565 - DNA, 21 bp, synthetic construct
  source 1..21: mol_type = other DNA
  modified_base 1: mod_base = OTHER; note = adenosine-3'-phosphate
  modified_base 2: mod_base = OTHER; note = adenosine-3'-phosphate
  modified_base 3: mod_base = OTHER; note = adenosine-3'-phosphate
  modified_base 4: mod_base = OTHER; note = adenosine-3'-phosphate
  modified_base 5: mod_base = OTHER; note = uridine-3'-phosphate
  modified_base 6: mod_base = OTHER; note = adenosine-3'-phosphate
  modified_base 7: mod_base = OTHER; note = adenosine-3'-phosphate
  modified_base 8: mod_base = OTHER; note = cytidine-3'-phosphate
  modified_base 9: mod_base = OTHER; note = uridine-3'-phosphate
  modified_base 10: mod_base = OTHER; note = cytidine-3'-phosphate
  modified_base 11: mod_base = OTHER; note = cytidine-3'-phosphate
  modified_base 12: mod_base = OTHER; note = guanosine-3'-phosphate
  modified_base 13: mod_base = OTHER; note = adenosine-3'-phosphate
  modified_base 14: mod_base = OTHER; note = adenosine-3'-phosphate
  modified_base 15: mod_base = OTHER; note = uridine-3'-phosphate
  modified_base 16: mod_base = OTHER; note = uridine-3'-phosphate
  modified_base 17: mod_base = OTHER; note = uridine-3'-phosphate
  modified_base 18: mod_base = OTHER; note = cytidine-3'-phosphate
  modified_base 19: mod_base = OTHER; note = uridine-3'-phosphate
  misc_feature 1..19: note = RNA
  misc_feature 20..21: note = DNA
aaaataactccgaatttcttt

SEQ ID NO: 2566 - DNA, 21 bp, synthetic construct
  source 1..21: mol_type = other DNA
  modified_base 1: mod_base = OTHER; note = adenosine-3'-phosphate
  modified_base 2: mod_base = OTHER; note = guanosine-3'-phosphate
  modified_base 3: mod_base = OTHER; note = cytidine-3'-phosphate
  modified_base 4: mod_base = OTHER; note = uridine-3'-phosphate
  modified_base 5: mod_base = OTHER; note = uridine-3'-phosphate
  modified_base 6: mod_base = OTHER; note = uridine-3'-phosphate
  modified_base 7: mod_base = OTHER; note = cytidine-3'-phosphate
  modified_base 8: mod_base = OTHER; note = uridine-3'-phosphate
  modified_base 9: mod_base = OTHER; note = guanosine-3'-phosphate
  modified_base 10: mod_base = OTHER; note = guanosine-3'-phosphate
  modified_base 11: mod_base = OTHER; note = adenosine-3'-phosphate
  modified_base 12: mod_base = OTHER; note = adenosine-3'-phosphate
  modified_base 13: mod_base = OTHER; note = adenosine-3'-phosphate
  modified_base 14: mod_base = OTHER; note = adenosine-3'-phosphate
  modified_base 15: mod_base = OTHER; note = uridine-3'-phosphate
  modified_base 16: mod_base = OTHER; note = adenosine-3'-phosphate
  modified_base 17: mod_base = OTHER; note = adenosine-3'-phosphate
  modified_base 18: mod_base = OTHER; note = cytidine-3'-phosphate
  modified_base 19: mod_base = OTHER; note = uridine-3'-phosphate
  misc_feature 1..19: note = RNA
  misc_feature 20..21: note = DNA
agctttctggaaaataacttt

SEQ ID NO: 2567 - DNA, 21 bp, synthetic construct
  source 1..21: mol_type = other DNA
  modified_base 1: mod_base = OTHER; note = uridine-3'-phosphate
  modified_base 2: mod_base = OTHER; note = cytidine-3'-phosphate
  modified_base 3: mod_base = OTHER; note = cytidine-3'-phosphate
  modified_base 4: mod_base = OTHER; note = cytidine-3'-phosphate
  modified_base 5: mod_base = OTHER; note = adenosine-3'-phosphate
  modified_base 6: mod_base = OTHER; note = cytidine-3'-phosphate
  modified_base 7: mod_base = OTHER; note = adenosine-3'-phosphate
  modified_base 8: mod_base = OTHER; note = adenosine-3'-phosphate
  modified_base 9: mod_base = OTHER; note = cytidine-3'-phosphate
  modified_base 10: mod_base = OTHER; note = cytidine-3'-phosphate
  modified_base 11: mod_base = OTHER; note = adenosine-3'-phosphate
  modified_base 12: mod_base = OTHER; note = guanosine-3'-phosphate
  modified_base 13: mod_base = OTHER; note = cytidine-3'-phosphate
  modified_base 14: mod_base = OTHER; note = uridine-3'-phosphate
  modified_base 15: mod_base = OTHER; note = uridine-3'-phosphate
  modified_base 16: mod_base = OTHER; note = uridine-3'-phosphate
  modified_base 17: mod_base = OTHER; note = cytidine-3'-phosphate
  modified_base 18: mod_base = OTHER; note = uridine-3'-phosphate
  modified_base 19: mod_base = OTHER; note = guanosine-3'-phosphate
  misc_feature 1..19: note = RNA
  misc_feature 20..21: note = DNA
tcccacaaccagctttctgtt

SEQ ID NO: 2568 - DNA, 21 bp, synthetic construct
  source 1..21: mol_type = other DNA
  modified_base 1: mod_base = OTHER; note = adenosine-3'-phosphate
  modified_base 2: mod_base = OTHER; note = adenosine-3'-phosphate
  modified_base 3: mod_base = OTHER; note = cytidine-3'-phosphate
  modified_base 4: mod_base = OTHER; note = adenosine-3'-phosphate
  modified_base 5: mod_base = OTHER; note = adenosine-3'-phosphate
  modified_base 6: mod_base = OTHER; note = guanosine-3'-phosphate
  modified_base 7: mod_base = OTHER; note = adenosine-3'-phosphate
  modified_base 8: mod_base = OTHER; note = uridine-3'-phosphate
  modified_base 9: mod_base = OTHER; note = guanosine-3'-phosphate
  modified_base 10: mod_base = OTHER; note = adenosine-3'-phosphate
  modified_base 11: mod_base = OTHER; note = adenosine-3'-phosphate
  modified_base 12: mod_base = OTHER; note = cytidine-3'-phosphate
  modified_base 13: mod_base = OTHER; note = uridine-3'-phosphate
  modified_base 14: mod_base = OTHER; note = uridine-3'-phosphate
  modified_base 15: mod_base = OTHER; note = cytidine-3'-phosphate
  modified_base 16: mod_base = OTHER; note = cytidine-3'-phosphate
  modified_base 17: mod_base = OTHER; note = cytidine-3'-phosphate
  modified_base 18: mod_base = OTHER; note = adenosine-3'-phosphate
  modified_base 19: mod_base = OTHER; note = cytidine-3'-phosphate
  misc_feature 1..19: note = RNA
  misc_feature 20..21: note = DNA
aacaagatgaacttcccactt

SEQ ID NO: 2569 - DNA, 21 bp, synthetic construct
  source 1..21: mol_type = other DNA
  modified_base 1: mod_base = OTHER; note = uridine-3'-phosphate
  modified_base 2: mod_base = OTHER; note = cytidine-3'-phosphate
  modified_base 3: mod_base = OTHER; note = uridine-3'-phosphate
  modified_base 4: mod_base = OTHER; note = uridine-3'-phosphate
  modified_base 5: mod_base = OTHER; note = cytidine-3'-phosphate
  modified_base 6: mod_base = OTHER; note = uridine-3'-phosphate
  modified_base 7: mod_base = OTHER; note = guanosine-3'-phosphate
  modified_base 8: mod_base = OTHER; note = guanosine-3'-phosphate
  modified_base 9: mod_base = OTHER; note = guanosine-3'-phosphate
  modified_base 10: mod_base = OTHER; note = adenosine-3'-phosphate
  modified_base 11: mod_base = OTHER; note = adenosine-3'-phosphate
  modified_base 12: mod_base = OTHER; note = cytidine-3'-phosphate
  modified_base 13: mod_base = OTHER; note = adenosine-3'-phosphate
  modified_base 14: mod_base = OTHER; note = adenosine-3'-phosphate
  modified_base 15: mod_base = OTHER; note = guanosine-3'-phosphate
  modified_base 16: mod_base = OTHER; note = adenosine-3'-phosphate
  modified_base 17: mod_base = OTHER; note = uridine-3'-phosphate
  modified_base 18: mod_base = OTHER; note = guanosine-3'-phosphate
  modified_base 19: mod_base = OTHER; note = adenosine-3'-phosphate
  misc_feature 1..19: note = RNA
  misc_feature 20..21: note = DNA
tcttctgggaacaagatgatt

SEQ ID NO: 2570 - DNA, 21 bp, synthetic construct
  source 1..21: mol_type = other DNA
  modified_base 1: mod_base = OTHER; note = uridine-3'-phosphate
  modified_base 2: mod_base = OTHER; note = guanosine-3'-phosphate
  modified_base 3: mod_base = OTHER; note = cytidine-3'-phosphate
  modified_base 4: mod_base = OTHER; note = adenosine-3'-phosphate
  modified_base 5: mod_base = OTHER; note = adenosine-3'-phosphate
  modified_base 6: mod_base = OTHER; note = cytidine-3'-phosphate
  modified_base 7: mod_base = OTHER; note = uridine-3'-phosphate
  modified_base 8: mod_base = OTHER; note = guanosine-3'-phosphate
  modified_base 9: mod_base = OTHER; note = uridine-3'-phosphate
  modified_base 10: mod_base = OTHER; note = uridine-3'-phosphate
  modified_base 11: mod_base = OTHER; note = uridine-3'-phosphate
  modified_base 12: mod_base = OTHER; note = uridine-3'-phosphate
  modified_base 13: mod_base = OTHER; note = cytidine-3'-phosphate
  modified_base 14: mod_base = OTHER; note = uridine-3'-phosphate
  modified_base 15: mod_base = OTHER; note = uridine-3'-phosphate
  modified_base 16: mod_base = OTHER; note = cytidine-3'-phosphate
  modified_base 17: mod_base = OTHER; note = uridine-3'-phosphate
  modified_base 18: mod_base = OTHER; note = guanosine-3'-phosphate
  modified_base 19: mod_base = OTHER; note = guanosine-3'-phosphate
  misc_feature 1..19: note = RNA
  misc_feature 20..21: note = DNA
tgcaactgttttcttctggtt

SEQ ID NO: 2571 - DNA, 21 bp, synthetic construct
  source 1..21: mol_type = other DNA
  modified_base 1: mod_base = OTHER; note = guanosine-3'-phosphate
  modified_base 2: mod_base = OTHER; note = uridine-3'-phosphate
  modified_base 3: mod_base = OTHER; note = adenosine-3'-phosphate
  modified_base 4: mod_base = OTHER; note = guanosine-3'-phosphate
  modified_base 5: mod_base = OTHER; note = guanosine-3'-phosphate
  modified_base 6: mod_base = OTHER; note = guanosine-3'-phosphate
  modified_base 7: mod_base = OTHER; note = cytidine-3'-phosphate
  modified_base 8: mod_base = OTHER; note = adenosine-3'-phosphate
  modified_base 9: mod_base = OTHER; note = adenosine-3'-phosphate
  modified_base 10: mod_base = OTHER; note = adenosine-3'-phosphate
  modified_base 11: mod_base = OTHER; note = cytidine-3'-phosphate
  modified_base 12: mod_base = OTHER; note = uridine-3'-phosphate
  modified_base 13: mod_base = OTHER; note = guanosine-3'-phosphate
  modified_base 14: mod_base = OTHER; note = cytidine-3'-phosphate
  modified_base 15: mod_base = OTHER; note = adenosine-3'-phosphate
  modified_base 16: mod_base = OTHER; note = adenosine-3'-phosphate
  modified_base 17: mod_base = OTHER; note = cytidine-3'-phosphate
  modified_base 18: mod_base = OTHER; note = uridine-3'-phosphate
  modified_base 19: mod_base = OTHER; note = guanosine-3'-phosphate
  misc_feature 1..19: note = RNA
  misc_feature 20..21: note = DNA
gtagggcaaactgcaactgtt

SEQ ID NO: 2572 - DNA, 21 bp, synthetic construct
  source 1..21: mol_type = other DNA
  modified_base 1: mod_base = OTHER; note = adenosine-3'-phosphate
  modified_base 2: mod_base = OTHER; note = adenosine-3'-phosphate
  modified_base 3: mod_base = OTHER; note = uridine-3'-phosphate
  modified_base 4: mod_base = OTHER; note = cytidine-3'-phosphate
  modified_base 5: mod_base = OTHER; note = adenosine-3'-phosphate
  modified_base 6: mod_base = OTHER; note = guanosine-3'-phosphate
  modified_base 7: mod_base = OTHER; note = guanosine-3'-phosphate
  modified_base 8: mod_base = OTHER; note = uridine-3'-phosphate
  modified_base 9: mod_base = OTHER; note = adenosine-3'-phosphate
  modified_base 10: mod_base = OTHER; note = guanosine-3'-phosphate
  modified_base 11: mod_base = OTHER; note = guanosine-3'-phosphate
  modified_base 12: mod_base = OTHER; note = guanosine-3'-phosphate
  modified_base 13: mod_base = OTHER; note = cytidine-3'-phosphate
  modified_base 14: mod_base = OTHER; note = adenosine-3'-phosphate
  modified_base 15: mod_base = OTHER; note = adenosine-3'-phosphate
  modified_base 16: mod_base = OTHER; note = adenosine-3'-phosphate
  modified_base 17: mod_base = OTHER; note = cytidine-3'-phosphate
  modified_base 18: mod_base = OTHER; note = uridine-3'-phosphate
  modified_base 19: mod_base = OTHER; note = guanosine-3'-phosphate
  misc_feature 1..19: note = RNA
  misc_feature 20..21: note = DNA
aatcaggtagggcaaactgtt

SEQ ID NO: 2573 - DNA, 21 bp, synthetic construct
  source 1..21: mol_type = other DNA
  modified_base 1: mod_base = OTHER; note = adenosine-3'-phosphate
  modified_base 2: mod_base = OTHER; note = guanosine-3'-phosphate
  modified_base 3: mod_base = OTHER; note = guanosine-3'-phosphate
  modified_base 4: mod_base = OTHER; note = uridine-3'-phosphate
  modified_base 5: mod_base = OTHER; note = guanosine-3'-phosphate
  modified_base 6: mod_base = OTHER; note = guanosine-3'-phosphate
  modified_base 7: mod_base = OTHER; note = uridine-3'-phosphate
  modified_base 8: mod_base = OTHER; note = uridine-3'-phosphate
  modified_base 9: mod_base = OTHER; note = adenosine-3'-phosphate
  modified_base 10: mod_base = OTHER; note = guanosine-3'-phosphate
  modified_base 11: mod_base = OTHER; note = adenosine-3'-phosphate
  modified_base 12: mod_base = OTHER; note = guanosine-3'-phosphate
  modified_base 13: mod_base = OTHER; note = adenosine-3'-phosphate
  modified_base 14: mod_base = OTHER; note = adenosine-3'-phosphate
  modified_base 15: mod_base = OTHER; note = uridine-3'-phosphate
  modified_base 16: mod_base = OTHER; note = cytidine-3'-phosphate
  modified_base 17: mod_base = OTHER; note = adenosine-3'-phosphate
  modified_base 18: mod_base = OTHER; note = guanosine-3'-phosphate
  modified_base 19: mod_base = OTHER; note = guanosine-3'-phosphate
  misc_feature 1..19: note = RNA
  misc_feature 20..21: note = DNA
aggtggttagagaatcaggtt

SEQ ID NO: 2574 - DNA, 21 bp, synthetic construct
  source 1..21: mol_type = other DNA
  modified_base 1: mod_base = OTHER; note = cytidine-3'-phosphate
  modified_base 2: mod_base = OTHER; note = uridine-3'-phosphate
  modified_base 3: mod_base = OTHER; note = uridine-3'-phosphate
  modified_base 4: mod_base = OTHER; note = guanosine-3'-phosphate
  modified_base 5: mod_base = OTHER; note = adenosine-3'-phosphate
  modified_base 6: mod_base = OTHER; note = adenosine-3'-phosphate
  modified_base 7: mod_base = OTHER; note = uridine-3'-phosphate
  modified_base 8: mod_base = OTHER; note = uridine-3'-phosphate
  modified_base 9: mod_base = OTHER; note = uridine-3'-phosphate
  modified_base 10: mod_base = OTHER; note = cytidine-3'-phosphate
  modified_base 11: mod_base = OTHER; note = cytidine-3'-phosphate
  modified_base 12: mod_base = OTHER; note = cytidine-3'-phosphate
  modified_base 13: mod_base = OTHER; note = adenosine-3'-phosphate
  modified_base 14: mod_base = OTHER; note = guanosine-3'-phosphate
  modified_base 15: mod_base = OTHER; note = guanosine-3'-phosphate
  modified_base 16: mod_base = OTHER; note = uridine-3'-phosphate
  modified_base 17: mod_base = OTHER; note = guanosine-3'-phosphate
  modified_base 18: mod_base = OTHER; note = guanosine-3'-phosphate
  modified_base 19: mod_base = OTHER; note = uridine-3'-phosphate
  misc_feature 1..19: note = RNA
  misc_feature 20..21: note = DNA
cttgaatttcccaggtggttt

SEQ ID NO: 2575 - DNA, 21 bp, synthetic construct
  source 1..21: mol_type = other DNA
  modified_base 1: mod_base = OTHER; note = uridine-3'-phosphate
  modified_base 2: mod_base = OTHER; note = guanosine-3'-phosphate
  modified_base 3: mod_base = OTHER; note = cytidine-3'-phosphate
  modified_base 4: mod_base = OTHER; note = cytidine-3'-phosphate
  modified_base 5: mod_base = OTHER; note = adenosine-3'-phosphate
  modified_base 6: mod_base = OTHER; note = adenosine-3'-phosphate
  modified_base 7: mod_base = OTHER; note = cytidine-3'-phosphate
  modified_base 8: mod_base = OTHER; note = guanosine-3'-phosphate
  modified_base 9: mod_base = OTHER; note = cytidine-3'-phosphate
  modified_base 10: mod_base = OTHER; note = cytidine-3'-phosphate
  modified_base 11: mod_base = OTHER; note = uridine-3'-phosphate
  modified_base 12: mod_base = OTHER; note = uridine-3'-phosphate
  modified_base 13: mod_base = OTHER; note = guanosine-3'-phosphate
  modified_base 14: mod_base = OTHER; note = adenosine-3'-phosphate
  modified_base 15: mod_base = OTHER; note = adenosine-3'-phosphate
  modified_base 16: mod_base = OTHER; note = uridine-3'-phosphate
  modified_base 17: mod_base = OTHER; note = uridine-3'-phosphate
  modified_base 18: mod_base = OTHER; note = uridine-3'-phosphate
  modified_base 19: mod_base = OTHER; note = cytidine-3'-phosphate
  misc_feature 1..19: note = RNA
  misc_feature 20..21: note = DNA
tgccaacgccttgaatttctt

SEQ ID NO: 2576 - DNA, 21 bp, synthetic construct
  source 1..21: mol_type = other DNA
  modified_base 1: mod_base = OTHER; note = adenosine-3'-phosphate
  modified_base 2: mod_base = OTHER; note = guanosine-3'-phosphate
  modified_base 3: mod_base = OTHER; note = uridine-3'-phosphate
  modified_base 4: mod_base = OTHER; note = guanosine-3'-phosphate
  modified_base 5: mod_base = OTHER; note = uridine-3'-phosphate
  modified_base 6: mod_base = OTHER; note = uridine-3'-phosphate
  modified_base 7: mod_base = OTHER; note = uridine-3'-phosphate
  modified_base 8: mod_base = OTHER; note = guanosine-3'-phosphate
  modified_base 9: mod_base = OTHER; note = adenosine-3'-phosphate
  modified_base 10: mod_base = OTHER; note = adenosine-3'-phosphate
  modified_base 11: mod_base = OTHER; note = adenosine-3'-phosphate
  modified_base 12: mod_base = OTHER; note = uridine-3'-phosphate
  modified_base 13: mod_base = OTHER; note = guanosine-3'-phosphate
  modified_base 14: mod_base = OTHER; note = cytidine-3'-phosphate
  modified_base 15: mod_base = OTHER; note = cytidine-3'-phosphate
  modified_base 16: mod_base = OTHER; note = adenosine-3'-phosphate
  modified_base 17: mod_base = OTHER; note = adenosine-3'-phosphate
  modified_base 18: mod_base = OTHER; note = cytidine-3'-phosphate
  modified_base 19: mod_base = OTHER; note = guanosine-3'-phosphate
  misc_feature 1..19: note = RNA
  misc_feature 20..21: note = DNA
agtgtttgaaatgccaacgtt

SEQ ID NO: 2577 - DNA, 21 bp, synthetic construct
  source 1..21: mol_type = other DNA
  modified_base 1: mod_base = OTHER; note = uridine-3'-phosphate
  modified_base 2: mod_base = OTHER; note = adenosine-3'-phosphate
  modified_base 3: mod_base = OTHER; note = uridine-3'-phosphate
  modified_base 4: mod_base = OTHER; note = adenosine-3'-phosphate
  modified_base 5: mod_base = OTHER; note = cytidine-3'-phosphate
  modified_base 6: mod_base = OTHER; note = cytidine-3'-phosphate
  modified_base 7: mod_base = OTHER; note = adenosine-3'-phosphate
  modified_base 8: mod_base = OTHER; note = guanosine-3'-phosphate
  modified_base 9: mod_base = OTHER; note = uridine-3'-phosphate
  modified_base 10: mod_base = OTHER; note = guanosine-3'-phosphate
  modified_base 11: mod_base = OTHER; note = uridine-3'-phosphate
  modified_base 12: mod_base = OTHER; note = uridine-3'-phosphate
  modified_base 13: mod_base = OTHER; note = uridine-3'-phosphate
  modified_base 14: mod_base = OTHER; note = guanosine-3'-phosphate
  modified_base 15: mod_base = OTHER; note = adenosine-3'-phosphate
  modified_base 16: mod_base = OTHER; note = adenosine-3'-phosphate
  modified_base 17: mod_base = OTHER; note = adenosine-3'-phosphate
  modified_base 18: mod_base = OTHER; note = uridine-3'-phosphate
  modified_base 19: mod_base = OTHER; note = guanosine-3'-phosphate
  misc_feature 1..19: note = RNA
  misc_feature 20..21: note = DNA
tataccagtgtttgaaatgtt

SEQ ID NO: 2578 - DNA, 21 bp, synthetic construct
  source 1..21: mol_type = other DNA
  modified_base 1: mod_base = OTHER; note = guanosine-3'-phosphate
  modified_base 2: mod_base = OTHER; note = uridine-3'-phosphate
  modified_base 3: mod_base = OTHER; note = adenosine-3'-phosphate
  modified_base 4: mod_base = OTHER; note = uridine-3'-phosphate
  modified_base 5: mod_base = OTHER; note = cytidine-3'-phosphate
  modified_base 6: mod_base = OTHER; note = adenosine-3'-phosphate
  modified_base 7: mod_base = OTHER; note = guanosine-3'-phosphate
  modified_base 8: mod_base = OTHER; note = cytidine-3'-phosphate
  modified_base 9: mod_base = OTHER; note = adenosine-3'-phosphate
  modified_base 10: mod_base = OTHER; note = adenosine-3'-phosphate
  modified_base 11: mod_base = OTHER; note = cytidine-3'-phosphate
  modified_base 12: mod_base = OTHER; note = adenosine-3'-phosphate
  modified_base 13: mod_base = OTHER; note = cytidine-3'-phosphate
  modified_base 14: mod_base = OTHER; note = adenosine-3'-phosphate
  modified_base 15: mod_base = OTHER; note = uridine-3'-phosphate
  modified_base 16: mod_base = OTHER; note = adenosine-3'-phosphate
  modified_base 17: mod_base = OTHER; note = uridine-3'-phosphate
  modified_base 18: mod_base = OTHER; note = adenosine-3'-phosphate
  modified_base 19: mod_base = OTHER; note = cytidine-3'-phosphate
  misc_feature 1..19: note = RNA
  misc_feature 20..21: note = DNA
gtatcagcaacacatatactt

SEQ ID NO: 2579 - DNA, 21 bp, synthetic construct
  source 1..21: mol_type = other DNA
  modified_base 1: mod_base = OTHER; note = uridine-3'-phosphate
  modified_base 2: mod_base = OTHER; note = guanosine-3'-phosphate
  modified_base 3: mod_base = OTHER; note = cytidine-3'-phosphate
  modified_base 4: mod_base = OTHER; note = cytidine-3'-phosphate
  modified_base 5: mod_base = OTHER; note = uridine-3'-phosphate
  modified_base 6: mod_base = OTHER; note = uridine-3'-phosphate
  modified_base 7: mod_base = OTHER; note = guanosine-3'-phosphate
  modified_base 8: mod_base = OTHER; note = adenosine-3'-phosphate
  modified_base 9: mod_base = OTHER; note = cytidine-3'-phosphate
  modified_base 10: mod_base = OTHER; note = adenosine-3'-phosphate
  modified_base 11: mod_base = OTHER; note = guanosine-3'-phosphate
  modified_base 12: mod_base = OTHER; note = uridine-3'-phosphate
  modified_base 13: mod_base = OTHER; note = adenosine-3'-phosphate
  modified_base 14: mod_base = OTHER; note = uridine-3'-phosphate
  modified_base 15: mod_base = OTHER; note = cytidine-3'-phosphate
  modified_base 16: mod_base = OTHER; note = adenosine-3'-phosphate
  modified_base 17: mod_base = OTHER; note = guanosine-3'-phosphate
  modified_base 18: mod_base = OTHER; note = cytidine-3'-phosphate
  modified_base 19: mod_base = OTHER; note = adenosine-3'-phosphate
  misc_feature 1..19: note = RNA
  misc_feature 20..21: note = DNA
tgccttgacagtatcagcatt

SEQ ID NO: 2580 - DNA, 21 bp, synthetic construct
  source 1..21: mol_type = other DNA
  modified_base 1: mod_base = OTHER; note = adenosine-3'-phosphate
  modified_base 2: mod_base = OTHER; note = adenosine-3'-phosphate
  modified_base 3: mod_base = OTHER; note = cytidine-3'-phosphate
  modified_base 4: mod_base = OTHER; note = adenosine-3'-phosphate
  modified_base 5: mod_base = OTHER; note = cytidine-3'-phosphate
  modified_base 6: mod_base = OTHER; note = cytidine-3'-phosphate
  modified_base 7: mod_base = OTHER; note = uridine-3'-phosphate
  modified_base 8: mod_base = OTHER; note = uridine-3'-phosphate
  modified_base 9: mod_base = OTHER; note = uridine-3'-phosphate
  modified_base 10: mod_base = OTHER; note = guanosine-3'-phosphate
  modified_base 11: mod_base = OTHER; note = cytidine-3'-phosphate
  modified_base 12: mod_base = OTHER; note = cytidine-3'-phosphate
  modified_base 13: mod_base = OTHER; note = uridine-3'-phosphate
  modified_base 14: mod_base = OTHER; note = uridine-3'-phosphate
  modified_base 15: mod_base = OTHER; note = guanosine-3'-phosphate
  modified_base 16: mod_base = OTHER; note = adenosine-3'-phosphate
  modified_base 17: mod_base = OTHER; note = cytidine-3'-phosphate
  modified_base 18: mod_base = OTHER; note = adenosine-3'-phosphate
  modified_base 19: mod_base = OTHER; note = guanosine-3'-phosphate
  misc_feature 1..19: note = RNA
  misc_feature 20..21: note = DNA
aacacctttgccttgacagtt

SEQ ID NO: 2581 - DNA, 21 bp, synthetic construct
  source 1..21: mol_type = other DNA
  modified_base 1: mod_base = OTHER; note = adenosine-3'-phosphate
  modified_base 2: mod_base = OTHER; note = adenosine-3'-phosphate
  modified_base 3: mod_base = OTHER; note = guanosine-3'-phosphate
  modified_base 4: mod_base = OTHER; note = adenosine-3'-phosphate
  modified_base 5: mod_base = OTHER; note = cytidine-3'-phosphate
  modified_base 6: mod_base = OTHER; note = adenosine-3'-phosphate
  modified_base 7: mod_base = OTHER; note = uridine-3'-phosphate
  modified_base 8: mod_base = OTHER; note = cytidine-3'-phosphate
  modified_base 9: mod_base = OTHER; note = uridine-3'-phosphate
  modified_base 10: mod_base = OTHER; note = uridine-3'-phosphate
  modified_base 11: mod_base = OTHER; note = uridine-3'-phosphate
  modified_base 12: mod_base = OTHER; note = guanosine-3'-phosphate
  modified_base 13: mod_base = OTHER; note = adenosine-3'-phosphate
  modified_base 14: mod_base = OTHER; note = adenosine-3'-phosphate
  modified_base 15: mod_base = OTHER; note = cytidine-3'-phosphate
  modified_base 16: mod_base = OTHER; note = adenosine-3'-phosphate
  modified_base 17: mod_base = OTHER; note = cytidine-3'-phosphate
  modified_base 18: mod_base = OTHER; note = cytidine-3'-phosphate
  modified_base 19: mod_base = OTHER; note = uridine-3'-phosphate
  misc_feature 1..19: note = RNA
  misc_feature 20..21: note = DNA
aagacatctttgaacaccttt

SEQ ID NO: 2582 - DNA, 21 bp, synthetic construct
  source 1..21: mol_type = other DNA
  modified_base 1: mod_base = OTHER; note = uridine-3'-phosphate
  modified_base 2: mod_base = OTHER; note = uridine-3'-phosphate
  modified_base 3: mod_base = OTHER; note = cytidine-3'-phosphate
  modified_base 4: mod_base = OTHER; note = cytidine-3'-phosphate
  modified_base 5: mod_base = OTHER; note = adenosine-3'-phosphate
  modified_base 6: mod_base = OTHER; note = guanosine-3'-phosphate
  modified_base 7: mod_base = OTHER; note = guanosine-3'-phosphate
  modified_base 8: mod_base = OTHER; note = adenosine-3'-phosphate
  modified_base 9: mod_base = OTHER; note = adenosine-3'-phosphate
  modified_base 10: mod_base = OTHER; note = guanosine-3'-phosphate
  modified_base 11: mod_base = OTHER; note = adenosine-3'-phosphate
  modified_base 12: mod_base = OTHER; note = cytidine-3'-phosphate
  modified_base 13: mod_base = OTHER; note = adenosine-3'-phosphate
  modified_base 14: mod_base = OTHER; note = uridine-3'-phosphate
  modified_base 15: mod_base = OTHER; note = cytidine-3'-phosphate
  modified_base 16: mod_base = OTHER; note = uridine-3'-phosphate
  modified_base 17: mod_base = OTHER; note = uridine-3'-phosphate
  modified_base 18: mod_base = OTHER; note = uridine-3'-phosphate
  modified_base 19: mod_base = OTHER; note = guanosine-3'-phosphate
  misc_feature 1..19: note = RNA
  misc_feature 20..21: note = DNA
ttccaggaagacatctttgtt

SEQ ID NO: 2583 - DNA, 21 bp, synthetic construct
  source 1..21: mol_type = other DNA
  modified_base 1: mod_base = OTHER; note = uridine-3'-phosphate
  modified_base 2: mod_base = OTHER; note = adenosine-3'-phosphate
  modified_base 3: mod_base = OTHER; note = uridine-3'-phosphate
  modified_base 4: mod_base = OTHER; note = adenosine-3'-phosphate
  modified_base 5: mod_base = OTHER; note = uridine-3'-phosphate
  modified_base 6: mod_base = OTHER; note = uridine-3'-phosphate
  modified_base 7: mod_base = OTHER; note = cytidine-3'-phosphate
  modified_base 8: mod_base = OTHER; note = adenosine-3'-phosphate
  modified_base 9: mod_base = OTHER; note = uridine-3'-phosphate
  modified_base 10: mod_base = OTHER; note = uridine-3'-phosphate
  modified_base 11: mod_base = OTHER; note = uridine-3'-phosphate
  modified_base 12: mod_base = OTHER; note = cytidine-3'-phosphate
  modified_base 13: mod_base = OTHER; note = cytidine-3'-phosphate
  modified_base 14: mod_base = OTHER; note = adenosine-3'-phosphate
  modified_base 15: mod_base = OTHER; note = guanosine-3'-phosphate
  modified_base 16: mod_base = OTHER; note = guanosine-3'-phosphate
  modified_base 17: mod_base = OTHER; note = adenosine-3'-phosphate
  modified_base 18: mod_base = OTHER; note = adenosine-3'-phosphate
  modified_base 19: mod_base = OTHER; note = guanosine-3'-phosphate
  misc_feature 1..19: note = RNA
  misc_feature 20..21: note = DNA
tatattcatttccaggaagtt

SEQ ID NO: 2584 - DNA, 21 bp, synthetic construct
  source 1..21: mol_type = other DNA
  modified_base 1: mod_base = OTHER; note = adenosine-3'-phosphate
  modified_base 2: mod_base = OTHER; note = adenosine-3'-phosphate
  modified_base 3: mod_base = OTHER; note = cytidine-3'-phosphate
  modified_base 4: mod_base = OTHER; note = adenosine-3'-phosphate
  modified_base 5: mod_base = OTHER; note = guanosine-3'-phosphate
  modified_base 6: mod_base = OTHER; note = adenosine-3'-phosphate
  modified_base 7: mod_base = OTHER; note = adenosine-3'-phosphate
  modified_base 8: mod_base = OTHER; note = uridine-3'-phosphate
  modified_base 9: mod_base = OTHER; note = adenosine-3'-phosphate
  modified_base 10: mod_base = OTHER; note = uridine-3'-phosphate
  modified_base 11: mod_base = OTHER; note = guanosine-3'-phosphate
  modified_base 12: mod_base = OTHER; note = guanosine-3'-phosphate
  modified_base 13: mod_base = OTHER; note = uridine-3'-phosphate
  modified_base 14: mod_base = OTHER; note = adenosine-3'-phosphate
  modified_base 15: mod_base = OTHER; note = uridine-3'-phosphate
  modified_base 16: mod_base = OTHER; note = adenosine-3'-phosphate
  modified_base 17: mod_base = OTHER; note = uridine-3'-phosphate
  modified_base 18: mod_base = OTHER; note = uridine-3'-phosphate
  modified_base 19: mod_base = OTHER; note = cytidine-3'-phosphate
  misc_feature 1..19: note = RNA
  misc_feature 20..21: note = DNA
aacagaatatggtatattctt

SEQ ID NO: 2585 - DNA, 21 bp, synthetic construct
  source 1..21: mol_type = other DNA
  modified_base 1: mod_base = OTHER; note = uridine-3'-phosphate
  modified_base 2: mod_base = OTHER; note = cytidine-3'-phosphate
  modified_base 3: mod_base = OTHER; note = cytidine-3'-phosphate
  modified_base 4: mod_base = OTHER; note = uridine-3'-phosphate
  modified_base 5: mod_base = OTHER; note = cytidine-3'-phosphate
  modified_base 6: mod_base = OTHER; note = guanosine-3'-phosphate
  modified_base 7: mod_base = OTHER; note = uridine-3'-phosphate
  modified_base 8: mod_base = OTHER; note = adenosine-3'-phosphate
  modified_base 9: mod_base = OTHER; note = cytidine-3'-phosphate
  modified_base 10: mod_base = OTHER; note = adenosine-3'-phosphate
  modified_base 11: mod_base = OTHER; note = adenosine-3'-phosphate
  modified_base 12: mod_base = OTHER; note = cytidine-3'-phosphate
  modified_base 13: mod_base = OTHER; note = adenosine-3'-phosphate
  modified_base 14: mod_base = OTHER; note = guanosine-3'-phosphate
  modified_base 15: mod_base = OTHER; note = adenosine-3'-phosphate
  modified_base 16: mod_base = OTHER; note = adenosine-3'-phosphate
  modified_base 17: mod_base = OTHER; note = uridine-3'-phosphate
  modified_base 18: mod_base = OTHER; note = adenosine-3'-phosphate
  modified_base 19: mod_base = OTHER; note = uridine-3'-phosphate
  misc_feature 1..19: note = RNA
  misc_feature 20..21: note = DNA
tcctcgtacaacagaatattt

SEQ ID NO: 2586 - DNA, 21 bp, synthetic construct
  source 1..21: mol_type = other DNA
  modified_base 1: mod_base = OTHER; note = adenosine-3'-phosphate
  modified_base 2: mod_base = OTHER; note = uridine-3'-phosphate
  modified_base 3: mod_base = OTHER; note = uridine-3'-phosphate
  modified_base 4: mod_base = OTHER; note = guanosine-3'-phosphate
  modified_base 5: mod_base = OTHER; note = guanosine-3'-phosphate
  modified_base 6: mod_base = OTHER; note = adenosine-3'-phosphate
  modified_base 7: mod_base = OTHER; note = uridine-3'-phosphate
  modified_base 8: mod_base = OTHER; note = cytidine-3'-phosphate
  modified_base 9: mod_base = OTHER; note = uridine-3'-phosphate
  modified_base 10: mod_base = OTHER; note = guanosine-3'-phosphate
  modified_base 11: mod_base = OTHER; note = uridine-3'-phosphate
  modified_base 12: mod_base = OTHER; note = uridine-3'-phosphate
  modified_base 13: mod_base = OTHER; note = cytidine-3'-phosphate
  modified_base 14: mod_base = OTHER; note = uridine-3'-phosphate
  modified_base 15: mod_base = OTHER; note = cytidine-3'-phosphate
  modified_base 16: mod_base = OTHER; note = cytidine-3'-phosphate
  modified_base 17: mod_base = OTHER; note = uridine-3'-phosphate
  modified_base 18: mod_base = OTHER; note = cytidine-3'-phosphate
  modified_base 19: mod_base = OTHER; note = guanosine-3'-phosphate
  misc_feature 1..19: note = RNA
  misc_feature 20..21: note = DNA
attggatctgttctcctcgtt

SEQ ID NO: 2587 - DNA, 21 bp, synthetic construct
  source 1..21: mol_type = other DNA
  modified_base 1: mod_base = OTHER; note = cytidine-3'-phosphate
  modified_base 2: mod_base = OTHER; note = uridine-3'-phosphate
  modified_base 3: mod_base = OTHER; note = uridine-3'-phosphate
  modified_base 4: mod_base = OTHER; note = uridine-3'-phosphate
  modified_base 5: mod_base = OTHER; note = cytidine-3'-phosphate
  modified_base 6: mod_base = OTHER; note = adenosine-3'-phosphate
  modified_base 7: mod_base = OTHER; note = adenosine-3'-phosphate
  modified_base 8: mod_base = OTHER; note = uridine-3'-phosphate
  modified_base 9: mod_base = OTHER; note = uridine-3'-phosphate
  modified_base 10: mod_base = OTHER; note = guanosine-3'-phosphate
  modified_base 11: mod_base = OTHER; note = guanosine-3'-phosphate
  modified_base 12: mod_base = OTHER; note = adenosine-3'-phosphate
  modified_base 13: mod_base = OTHER; note = uridine-3'-phosphate
  modified_base 14: mod_base = OTHER; note = cytidine-3'-phosphate
  modified_base 15: mod_base = OTHER; note = uridine-3'-phosphate
  modified_base 16: mod_base = OTHER; note = guanosine-3'-phosphate
  modified_base 17: mod_base = OTHER; note = uridine-3'-phosphate
  modified_base 18: mod_base = OTHER; note = uridine-3'-phosphate
  modified_base 19: mod_base = OTHER; note = cytidine-3'-phosphate
  misc_feature 1..19: note = RNA
  misc_feature 20..21: note = DNA
ctttcaattggatctgttctt

SEQ ID NO: 2588 - DNA, 21 bp, synthetic construct
  source 1..21: mol_type = other DNA
  modified_base 1: mod_base = OTHER; note = guanosine-3'-phosphate
  modified_base 2: mod_base = OTHER; note = uridine-3'-phosphate
  modified_base 3: mod_base = OTHER; note = uridine-3'-phosphate
  modified_base 4: mod_base = OTHER; note = guanosine-3'-phosphate
  modified_base 5: mod_base = OTHER; note = uridine-3'-phosphate
  modified_base 6: mod_base = OTHER; note = adenosine-3'-phosphate
  modified_base 7: mod_base = OTHER; note = adenosine-3'-phosphate
  modified_base 8: mod_base = OTHER; note = adenosine-3'-phosphate
  modified_base 9: mod_base = OTHER; note = cytidine-3'-phosphate
  modified_base 10: mod_base = OTHER; note = adenosine-3'-phosphate
  modified_base 11: mod_base = OTHER; note = guanosine-3'-phosphate
  modified_base 12: mod_base = OTHER; note = uridine-3'-phosphate
  modified_base 13: mod_base = OTHER; note = uridine-3'-phosphate
  modified_base 14: mod_base = OTHER; note = cytidine-3'-phosphate
  modified_base 15: mod_base = OTHER; note = cytidine-3'-phosphate
  modified_base 16: mod_base = OTHER; note = uridine-3'-phosphate
  modified_base 17: mod_base = OTHER; note = uridine-3'-phosphate
  modified_base 18: mod_base = OTHER; note = uridine-3'-phosphate
  modified_base 19: mod_base = OTHER; note = cytidine-3'-phosphate
  misc_feature 1..19: note = RNA
  misc_feature 20..21: note = DNA
gttgtaaacagttcctttctt

SEQ ID NO: 2589 - DNA, 21 bp, synthetic construct
  source 1..21: mol_type = other DNA
  modified_base 1: mod_base = OTHER; note = uridine-3'-phosphate
  modified_base 2: mod_base = OTHER; note = cytidine-3'-phosphate
  modified_base 3: mod_base = OTHER; note = cytidine-3'-phosphate
  modified_base 4: mod_base = OTHER; note = uridine-3'-phosphate
  modified_base 5: mod_base = OTHER; note = adenosine-3'-phosphate
  modified_base 6: mod_base = OTHER; note = uridine-3'-phosphate
  modified_base 7: mod_base = OTHER; note = adenosine-3'-phosphate
  modified_base 8: mod_base = OTHER; note = guanosine-3'-phosphate
  modified_base 9: mod_base = OTHER; note = uridine-3'-phosphate
  modified_base 10: mod_base = OTHER; note = uridine-3'-phosphate
  modified_base 11: mod_base = OTHER; note = guanosine-3'-phosphate
  modified_base 12: mod_base = OTHER; note = uridine-3'-phosphate
  modified_base 13: mod_base = OTHER; note = adenosine-3'-phosphate
  modified_base 14: mod_base = OTHER; note = adenosine-3'-phosphate
  modified_base 15: mod_base = OTHER; note = adenosine-3'-phosphate
  modified_base 16: mod_base = OTHER; note = cytidine-3'-phosphate
  modified_base 17: mod_base = OTHER; note = adenosine-3'-phosphate
  modified_base 18: mod_base = OTHER; note = guanosine-3'-phosphate
  modified_base 19: mod_base = OTHER; note = uridine-3'-phosphate
  misc_feature 1..19: note = RNA
  misc_feature 20..21: note = DNA
tcctatagttgtaaacagttt

SEQ ID NO: 2590 - DNA, 21 bp, synthetic construct
  source 1..21: mol_type = other DNA
  modified_base 1: mod_base = OTHER; note = uridine-3'-phosphate
  modified_base 2: mod_base = OTHER; note = cytidine-3'-phosphate
  modified_base 3: mod_base = OTHER; note = cytidine-3'-phosphate
  modified_base 4: mod_base = OTHER; note = cytidine-3'-phosphate
  modified_base 5: mod_base = OTHER; note = adenosine-3'-phosphate
  modified_base 6: mod_base = OTHER; note = guanosine-3'-phosphate
  modified_base 7: mod_base = OTHER; note = adenosine-3'-phosphate
  modified_base 8: mod_base = OTHER; note = adenosine-3'-phosphate
  modified_base 9: mod_base = OTHER; note = guanosine-3'-phosphate
  modified_base 10: mod_base = OTHER; note = uridine-3'-phosphate
  modified_base 11: mod_base = OTHER; note = cytidine-3'-phosphate
  modified_base 12: mod_base = OTHER; note = cytidine-3'-phosphate
  modified_base 13: mod_base = OTHER; note = uridine-3'-phosphate
  modified_base 14: mod_base = OTHER; note = adenosine-3'-phosphate
  modified_base 15: mod_base = OTHER; note = uridine-3'-phosphate
  modified_base 16: mod_base = OTHER; note = adenosine-3'-phosphate
  modified_base 17: mod_base = OTHER; note = guanosine-3'-phosphate
  modified_base 18: mod_base = OTHER; note = uridine-3'-phosphate
  modified_base 19: mod_base = OTHER; note = uridine-3'-phosphate
  misc_feature 1..19: note = RNA
  misc_feature 20..21: note = DNA
tcccagaagtcctatagtttt

SEQ ID NO: 2591 - DNA, 21 bp, synthetic construct
  source 1..21: mol_type = other DNA
  modified_base 1: mod_base = OTHER; note = adenosine-3'-phosphate
  modified_base 2: mod_base = OTHER; note = adenosine-3'-phosphate
  modified_base 3: mod_base = OTHER; note = cytidine-3'-phosphate
  modified_base 4: mod_base = OTHER; note = adenosine-3'-phosphate
  modified_base 5: mod_base = OTHER; note = cytidine-3'-phosphate
  modified_base 6: mod_base = OTHER; note = adenosine-3'-phosphate
  modified_base 7: mod_base = OTHER; note = guanosine-3'-phosphate
  modified_base 8: mod_base = OTHER; note = adenosine-3'-phosphate
  modified_base 9: mod_base = OTHER; note = adenosine-3'-phosphate
  modified_base 10: mod_base = OTHER; note = cytidine-3'-phosphate
  modified_base 11: mod_base = OTHER; note = uridine-3'-phosphate
  modified_base 12: mod_base = OTHER; note = guanosine-3'-phosphate
  modified_base 13: mod_base = OTHER; note = cytidine-3'-phosphate
  modified_base 14: mod_base = OTHER; note = adenosine-3'-phosphate
  modified_base 15: mod_base = OTHER; note = uridine-3'-phosphate
  modified_base 16: mod_base = OTHER; note = cytidine-3'-phosphate
  modified_base 17: mod_base = OTHER; note = cytidine-3'-phosphate
  modified_base 18: mod_base = OTHER; note = cytidine-3'-phosphate
  modified_base 19: mod_base = OTHER; note = adenosine-3'-phosphate
  misc_feature 1..19: note = RNA
  misc_feature 20..21: note = DNA
aacacagaactgcatcccatt

SEQ ID NO: 2592 - DNA, 21 bp, synthetic construct
  source 1..21: mol_type = other DNA
  modified_base 1: mod_base = OTHER; note = adenosine-3'-phosphate
  modified_base 2: mod_base = OTHER; note = guanosine-3'-phosphate
  modified_base 3: mod_base = OTHER; note = adenosine-3'-phosphate
  modified_base 4: mod_base = OTHER; note = cytidine-3'-phosphate
  modified_base 5: mod_base = OTHER; note = adenosine-3'-phosphate
  modified_base 6: mod_base = OTHER; note = uridine-3'-phosphate
  modified_base 7: mod_base = OTHER; note = uridine-3'-phosphate
  modified_base 8: mod_base = OTHER; note = uridine-3'-phosphate
  modified_base 9: mod_base = OTHER; note = uridine-3'-phosphate
  modified_base 10: mod_base = OTHER; note = adenosine-3'-phosphate
  modified_base 11: mod_base = OTHER; note = adenosine-3'-phosphate
  modified_base 12: mod_base = OTHER; note = cytidine-3'-phosphate
  modified_base 13: mod_base = OTHER; note = adenosine-3'-phosphate
  modified_base 14: mod_base = OTHER; note = cytidine-3'-phosphate
  modified_base 15: mod_base = OTHER; note = adenosine-3'-phosphate
  modified_base 16: mod_base = OTHER; note = guanosine-3'-phosphate
  modified_base 17: mod_base = OTHER; note = adenosine-3'-phosphate
  modified_base 18: mod_base = OTHER; note = adenosine-3'-phosphate
  modified_base 19: mod_base = OTHER; note = cytidine-3'-phosphate
  misc_feature 1..19: note = RNA
  misc_feature 20..21: note = DNA
agacattttaacacagaactt

SEQ ID NO: 2593 - DNA, 21 bp, synthetic construct
  source 1..21: mol_type = other DNA
  modified_base 1: mod_base = OTHER; note = uridine-3'-phosphate
  modified_base 2: mod_base = OTHER; note = cytidine-3'-phosphate
  modified_base 3: mod_base = OTHER; note = cytidine-3'-phosphate
  modified_base 4: mod_base = OTHER; note = adenosine-3'-phosphate
  modified_base 5: mod_base = OTHER; note = cytidine-3'-phosphate
  modified_base 6: mod_base = OTHER; note = adenosine-3'-phosphate
  modified_base 7: mod_base = OTHER; note = guanosine-3'-phosphate
  modified_base 8: mod_base = OTHER; note = cytidine-3'-phosphate
  modified_base 9: mod_base = OTHER; note = adenosine-3'-phosphate
  modified_base 10: mod_base = OTHER; note = guanosine-3'-phosphate
  modified_base 11: mod_base = OTHER; note = adenosine-3'-phosphate
  modified_base 12: mod_base = OTHER; note = cytidine-3'-phosphate
  modified_base 13: mod_base = OTHER; note = adenosine-3'-phosphate
  modified_base 14: mod_base = OTHER; note = uridine-3'-phosphate
  modified_base 15: mod_base = OTHER; note = uridine-3'-phosphate
  modified_base 16: mod_base = OTHER; note = uridine-3'-phosphate
  modified_base 17: mod_base = OTHER; note = uridine-3'-phosphate
  modified_base 18: mod_base = OTHER; note = adenosine-3'-phosphate
  modified_base 19: mod_base = OTHER; note = adenosine-3'-phosphate
  misc_feature 1..19: note = RNA
  misc_feature 20..21: note = DNA
tccacagcagacattttaatt

SEQ ID NO: 2594 - DNA, 21 bp, synthetic construct
  source 1..21: mol_type = other DNA
  modified_base 1: mod_base = OTHER; note = guanosine-3'-phosphate
  modified_base 2: mod_base = OTHER; note = uridine-3'-phosphate
  modified_base 3: mod_base = OTHER; note = guanosine-3'-phosphate
  modified_base 4: mod_base = OTHER; note = cytidine-3'-phosphate
  modified_base 5: mod_base = OTHER; note = adenosine-3'-phosphate
  modified_base 6: mod_base = OTHER; note = guanosine-3'-phosphate
  modified_base 7: mod_base = OTHER; note = adenosine-3'-phosphate
  modified_base 8: mod_base = OTHER; note = uridine-3'-phosphate
  modified_base 9: mod_base = OTHER; note = uridine-3'-phosphate
  modified_base 10: mod_base = OTHER; note = cytidine-3'-phosphate
  modified_base 11: mod_base = OTHER; note = cytidine-3'-phosphate
  modified_base 12: mod_base = OTHER; note = cytidine-3'-phosphate
  modified_base 13: mod_base = OTHER; note = uridine-3'-phosphate
  modified_base 14: mod_base = OTHER; note = cytidine-3'-phosphate
  modified_base 15: mod_base = OTHER; note = cytidine-3'-phosphate
  modified_base 16: mod_base = OTHER; note = adenosine-3'-phosphate
  modified_base 17: mod_base = OTHER; note = cytidine-3'-phosphate
  modified_base 18: mod_base = OTHER; note = adenosine-3'-phosphate
  modified_base 19: mod_base = OTHER; note = guanosine-3'-phosphate
  misc_feature 1..19: note = RNA
  misc_feature 20..21: note = DNA
gtgcagattccctccacagtt

SEQ ID NO: 2595 - DNA, 21 bp, synthetic construct
  source 1..21: mol_type = other DNA
  modified_base 1: mod_base = OTHER; note = uridine-3'-phosphate
  modified_base 2: mod_base = OTHER; note = uridine-3'-phosphate
  modified_base 3: mod_base = OTHER; note = uridine-3'-phosphate
  modified_base 4: mod_base = OTHER; note = cytidine-3'-phosphate
  modified_base 5: mod_base = OTHER; note = cytidine-3'-phosphate
  modified_base 6: mod_base = OTHER; note = guanosine-3'-phosphate
  modified_base 7: mod_base = OTHER; note = adenosine-3'-phosphate
  modified_base 8: mod_base = OTHER; note = adenosine-3'-phosphate
  modified_base 9: mod_base = OTHER; note = guanosine-3'-phosphate
  modified_base 10: mod_base = OTHER; note = uridine-3'-phosphate
  modified_base 11: mod_base = OTHER; note = guanosine-3'-phosphate
  modified_base 12: mod_base = OTHER; note = cytidine-3'-phosphate
  modified_base 13: mod_base = OTHER; note = adenosine-3'-phosphate
  modified_base 14: mod_base = OTHER; note = guanosine-3'-phosphate
  modified_base 15: mod_base = OTHER; note = adenosine-3'-phosphate
  modified_base 16: mod_base = OTHER; note = uridine-3'-phosphate
  modified_base 17: mod_base = OTHER; note = uridine-3'-phosphate
  modified_base 18: mod_base = OTHER; note = cytidine-3'-phosphate
  modified_base 19: mod_base = OTHER; note = cytidine-3'-phosphate
  misc_feature 1..19: note = RNA
  misc_feature 20..21: note = DNA
tttccgaagtgcagattcctt

SEQ ID NO: 2596 - DNA, 21 bp, synthetic construct
  source 1..21: mol_type = other DNA
  modified_base 1: mod_base = OTHER; note = uridine-3'-phosphate
  modified_base 2: mod_base = OTHER; note = cytidine-3'-phosphate
  modified_base 3: mod_base = OTHER; note = adenosine-3'-phosphate
  modified_base 4: mod_base = OTHER; note = adenosine-3'-phosphate
  modified_base 5: mod_base = OTHER; note = uridine-3'-phosphate
  modified_base 6: mod_base = OTHER; note = guanosine-3'-phosphate
  modified_base 7: mod_base = OTHER; note = adenosine-3'-phosphate
  modified_base 8: mod_base = OTHER; note = cytidine-3'-phosphate
  modified_base 9: mod_base = OTHER; note = uridine-3'-phosphate
  modified_base 10: mod_base = OTHER; note = guanosine-3'-phosphate
  modified_base 11: mod_base = OTHER; note = guanosine-3'-phosphate
  modified_base 12: mod_base = OTHER; note = guanosine-3'-phosphate
  modified_base 13: mod_base = OTHER; note = cytidine-3'-phosphate
  modified_base 14: mod_base = OTHER; note = uridine-3'-phosphate
  modified_base 15: mod_base = OTHER; note = uridine-3'-phosphate
  modified_base 16: mod_base = OTHER; note = uridine-3'-phosphate
  modified_base 17: mod_base = OTHER; note = cytidine-3'-phosphate
  modified_base 18: mod_base = OTHER; note = cytidine-3'-phosphate
  modified_base 19: mod_base = OTHER; note = guanosine-3'-phosphate
  misc_feature 1..19: note = RNA
  misc_feature 20..21: note = DNA
tcaatgactgggctttccgtt

SEQ ID NO: 2597 - DNA, 21 bp, synthetic construct
  source 1..21: mol_type = other DNA
  modified_base 1: mod_base = OTHER; note = cytidine-3'-phosphate
  modified_base 2: mod_base = OTHER; note = cytidine-3'-phosphate
  modified_base 3: mod_base = OTHER; note = uridine-3'-phosphate
  modified_base 4: mod_base = OTHER; note = guanosine-3'-phosphate
  modified_base 5: mod_base = OTHER; note = adenosine-3'-phosphate
  modified_base 6: mod_base = OTHER; note = uridine-3'-phosphate
  modified_base 7: mod_base = OTHER; note = guanosine-3'-phosphate
  modified_base 8: mod_base = OTHER; note = adenosine-3'-phosphate
  modified_base 9: mod_base = OTHER; note = uridine-3'-phosphate
  modified_base 10: mod_base = OTHER; note = cytidine-3'-phosphate
  modified_base 11: mod_base = OTHER; note = adenosine-3'-phosphate
  modified_base 12: mod_base = OTHER; note = adenosine-3'-phosphate
  modified_base 13: mod_base = OTHER; note = uridine-3'-phosphate
  modified_base 14: mod_base = OTHER; note = guanosine-3'-phosphate
  modified_base 15: mod_base = OTHER; note = adenosine-3'-phosphate
  modified_base 16: mod_base = OTHER; note = cytidine-3'-phosphate
  modified_base 17: mod_base = OTHER; note = uridine-3'-phosphate
  modified_base 18: mod_base = OTHER; note = guanosine-3'-phosphate
  modified_base 19: mod_base = OTHER; note = guanosine-3'-phosphate
  misc_feature 1..19: note = RNA
  misc_feature 20..21: note = DNA
cctgatgatcaatgactggtt

SEQ ID NO: 2598 - DNA, 21 bp, synthetic construct
  source 1..21: mol_type = other DNA
  modified_base 1: mod_base = OTHER; note = adenosine-3'-phosphate
  modified_base 2: mod_base = OTHER; note = guanosine-3'-phosphate
  modified_base 3: mod_base = OTHER; note = guanosine-3'-phosphate
  modified_base 4: mod_base = OTHER; note = adenosine-3'-phosphate
  modified_base 5: mod_base = OTHER; note = cytidine-3'-phosphate
  modified_base 6: mod_base = OTHER; note = uridine-3'-phosphate
  modified_base 7: mod_base = OTHER; note = uridine-3'-phosphate
  modified_base 8: mod_base = OTHER; note = uridine-3'-phosphate
  modified_base 9: mod_base = OTHER; note = guanosine-3'-phosphate
  modified_base 10: mod_base = OTHER; note = uridine-3'-phosphate
  modified_base 11: mod_base = OTHER; note = guanosine-3'-phosphate
  modified_base 12: mod_base = OTHER; note = cytidine-3'-phosphate
  modified_base 13: mod_base = OTHER; note = cytidine-3'-phosphate
  modified_base 14: mod_base = OTHER; note = cytidine-3'-phosphate
  modified_base 15: mod_base = OTHER; note = uridine-3'-phosphate
  modified_base 16: mod_base = OTHER; note = guanosine-3'-phosphate
  modified_base 17: mod_base = OTHER; note = adenosine-3'-phosphate
  modified_base 18: mod_base = OTHER; note = uridine-3'-phosphate
  modified_base 19: mod_base = OTHER; note = guanosine-3'-phosphate
  misc_feature 1..19: note = RNA
  misc_feature 20..21: note = DNA
aggactttgtgccctgatgtt

SEQ ID NO: 2599 - DNA, 21 bp, synthetic construct
  source 1..21: mol_type = other DNA
  modified_base 1: mod_base = OTHER; note = adenosine-3'-phosphate
  modified_base 2: mod_base = OTHER; note = uridine-3'-phosphate
  modified_base 3: mod_base = OTHER; note = uridine-3'-phosphate
  modified_base 4: mod_base = OTHER; note = uridine-3'-phosphate
  modified_base 5: mod_base = OTHER; note = guanosine-3'-phosphate
  modified_base 6: mod_base = OTHER; note = guanosine-3'-phosphate
  modified_base 7: mod_base = OTHER; note = adenosine-3'-phosphate
  modified_base 8: mod_base = OTHER; note = guanosine-3'-phosphate
  modified_base 9: mod_base = OTHER; note = guanosine-3'-phosphate
  modified_base 10: mod_base = OTHER; note = adenosine-3'-phosphate
  modified_base 11: mod_base = OTHER; note = cytidine-3'-phosphate
  modified_base 12: mod_base = OTHER; note = uridine-3'-phosphate
  modified_base 13: mod_base = OTHER; note = uridine-3'-phosphate
  modified_base 14: mod_base = OTHER; note = uridine-3'-phosphate
  modified_base 15: mod_base = OTHER; note = guanosine-3'-phosphate
  modified_base 16: mod_base = OTHER; note = uridine-3'-phosphate
  modified_base 17: mod_base = OTHER; note = guanosine-3'-phosphate
  modified_base 18: mod_base = OTHER; note = cytidine-3'-phosphate
  modified_base 19: mod_base = OTHER; note = cytidine-3'-phosphate
  misc_feature 1..19: note = RNA
  misc_feature 20..21: note = DNA
atttggaggactttgtgcctt

SEQ ID NO: 2600 - DNA, 21 bp, synthetic construct
  source 1..21: mol_type = other DNA
  modified_base 1: mod_base = OTHER; note = uridine-3'-phosphate
  modified_base 2: mod_base = OTHER; note = uridine-3'-phosphate
  modified_base 3: mod_base = OTHER; note = uridine-3'-phosphate
  modified_base 4: mod_base = OTHER; note = cytidine-3'-phosphate
  modified_base 5: mod_base = OTHER; note = uridine-3'-phosphate
  modified_base 6: mod_base = OTHER; note = guanosine-3'-phosphate
  modified_base 7: mod_base = OTHER; note = guanosine-3'-phosphate
  modified_base 8: mod_base = OTHER; note = cytidine-3'-phosphate
  modified_base 9: mod_base = OTHER; note = guanosine-3'-phosphate
  modified_base 10: mod_base = OTHER; note = cytidine-3'-phosphate
  modified_base 11: mod_base = OTHER; note = adenosine-3'-phosphate
  modified_base 12: mod_base = OTHER; note = cytidine-3'-phosphate
  modified_base 13: mod_base = OTHER; note = adenosine-3'-phosphate
  modified_base 14: mod_base = OTHER; note = cytidine-3'-phosphate
  modified_base 15: mod_base = OTHER; note = adenosine-3'-phosphate
  modified_base 16: mod_base = OTHER; note = uridine-3'-phosphate
  modified_base 17: mod_base = OTHER; note = uridine-3'-phosphate
  modified_base 18: mod_base = OTHER; note = uridine-3'-phosphate
  modified_base 19: mod_base = OTHER; note = guanosine-3'-phosphate
  misc_feature 1..19: note = RNA
  misc_feature 20..21: note = DNA
tttctggcgcacacatttgtt

SEQ ID NO: 2601 - DNA, 21 bp, synthetic construct
  source 1..21: mol_type = other DNA
  modified_base 1: mod_base = OTHER; note = guanosine-3'-phosphate
  modified_base 2: mod_base = OTHER; note = cytidine-3'-phosphate
  modified_base 3: mod_base = OTHER; note = cytidine-3'-phosphate
  modified_base 4: mod_base = OTHER; note = cytidine-3'-phosphate
  modified_base 5: mod_base = OTHER; note = uridine-3'-phosphate
  modified_base 6: mod_base = OTHER; note = cytidine-3'-phosphate
  modified_base 7: mod_base = OTHER; note = uridine-3'-phosphate
  modified_base 8: mod_base = OTHER; note = adenosine-3'-phosphate
  modified_base 9: mod_base = OTHER; note = cytidine-3'-phosphate
  modified_base 10: mod_base = OTHER; note = uridine-3'-phosphate
  modified_base 11: mod_base = OTHER; note = uridine-3'-phosphate
  modified_base 12: mod_base = OTHER; note = uridine-3'-phosphate
  modified_base 13: mod_base = OTHER; note = cytidine-3'-phosphate
  modified_base 14: mod_base = OTHER; note = uridine-3'-phosphate
  modified_base 15: mod_base = OTHER; note = guanosine-3'-phosphate
  modified_base 16: mod_base = OTHER; note = guanosine-3'-phosphate
  modified_base 17: mod_base = OTHER; note = cytidine-3'-phosphate
  modified_base 18: mod_base = OTHER; note = guanosine-3'-phosphate
  modified_base 19: mod_base = OTHER; note = cytidine-3'-phosphate
  misc_feature 1..19: note = RNA
  misc_feature 20..21: note = DNA
gccctctactttctggcgctt

SEQ ID NO: 2602 - DNA, 21 bp, synthetic construct
  source 1..21: mol_type = other DNA
  modified_base 1: mod_base = OTHER; note = adenosine-3'-phosphate
  modified_base 2: mod_base = OTHER; note = cytidine-3'-phosphate
  modified_base 3: mod_base = OTHER; note = uridine-3'-phosphate
  modified_base 4: mod_base = OTHER; note = guanosine-3'-phosphate
  modified_base 5: mod_base = OTHER; note = guanosine-3'-phosphate
  modified_base 6: mod_base = OTHER; note = adenosine-3'-phosphate
  modified_base 7: mod_base = OTHER; note = guanosine-3'-phosphate
  modified_base 8: mod_base = OTHER; note = guanosine-3'-phosphate
  modified_base 9: mod_base = OTHER; note = adenosine-3'-phosphate
  modified_base 10: mod_base = OTHER; note = guanosine-3'-phosphate
  modified_base 11: mod_base = OTHER; note = cytidine-3'-phosphate
  modified_base 12: mod_base = OTHER; note = cytidine-3'-phosphate
  modified_base 13: mod_base = OTHER; note = cytidine-3'-phosphate
  modified_base 14: mod_base = OTHER; note = uridine-3'-phosphate
  modified_base 15: mod_base = OTHER; note = cytidine-3'-phosphate
  modified_base 16: mod_base = OTHER; note = uridine-3'-phosphate
  modified_base 17: mod_base = OTHER; note = adenosine-3'-phosphate
  modified_base 18: mod_base = OTHER; note = cytidine-3'-phosphate
  modified_base 19: mod_base = OTHER; note = uridine-3'-phosphate
  misc_feature 1..19: note = RNA
  misc_feature 20..21: note = DNA
actggaggagccctctacttt

SEQ ID NO: 2603 - DNA, 21 bp, synthetic construct
  source 1..21: mol_type = other DNA
  modified_base 1: mod_base = OTHER; note = guanosine-3'-phosphate
  modified_base 2: mod_base = OTHER; note = uridine-3'-phosphate
  modified_base 3: mod_base = OTHER; note = cytidine-3'-phosphate
  modified_base 4: mod_base = OTHER; note = adenosine-3'-phosphate
  modified_base 5: mod_base = OTHER; note = cytidine-3'-phosphate
  modified_base 6: mod_base = OTHER; note = cytidine-3'-phosphate
  modified_base 7: mod_base = OTHER; note = adenosine-3'-phosphate
  modified_base 8: mod_base = OTHER; note = adenosine-3'-phosphate
  modified_base 9: mod_base = OTHER; note = guanosine-3'-phosphate
  modified_base 10: mod_base = OTHER; note = uridine-3'-phosphate
  modified_base 11: mod_base = OTHER; note = guanosine-3'-phosphate
  modified_base 12: mod_base = OTHER; note = adenosine-3'-phosphate
  modified_base 13: mod_base = OTHER; note = cytidine-3'-phosphate
  modified_base 14: mod_base = OTHER; note = uridine-3'-phosphate
  modified_base 15: mod_base = OTHER; note = guanosine-3'-phosphate
  modified_base 16: mod_base = OTHER; note = guanosine-3'-phosphate
  modified_base 17: mod_base = OTHER; note = adenosine-3'-phosphate
  modified_base 18: mod_base = OTHER; note = guanosine-3'-phosphate
  modified_base 19: mod_base = OTHER; note = guanosine-3'-phosphate
  misc_feature 1..19: note = RNA
  misc_feature 20..21: note = DNA
gtcaccaagtgactggaggtt

SEQ ID NO: 2604 - DNA, 21 bp, synthetic construct
  source 1..21: mol_type = other DNA
  modified_base 1: mod_base = OTHER; note = adenosine-3'-phosphate
  modified_base 2: mod_base = OTHER; note = guanosine-3'-phosphate
  modified_base 3: mod_base = OTHER; note = uridine-3'-phosphate
  modified_base 4: mod_base = OTHER; note = guanosine-3'-phosphate
  modified_base 5: mod_base = OTHER; note = adenosine-3'-phosphate
  modified_base 6: mod_base = OTHER; note = adenosine-3'-phosphate
  modified_base 7: mod_base = OTHER; note = uridine-3'-phosphate
  modified_base 8: mod_base = OTHER; note = guanosine-3'-phosphate
  modified_base 9: mod_base = OTHER; note = uridine-3'-phosphate
  modified_base 10: mod_base = OTHER; note = cytidine-3'-phosphate
  modified_base 11: mod_base = OTHER; note = adenosine-3'-phosphate
  modified_base 12: mod_base = OTHER; note = cytidine-3'-phosphate
  modified_base 13: mod_base = OTHER; note = cytidine-3'-phosphate
  modified_base 14: mod_base = OTHER; note = adenosine-3'-phosphate
  modified_base 15: mod_base = OTHER; note = adenosine-3'-phosphate
  modified_base 16: mod_base = OTHER; note = guanosine-3'-phosphate
  modified_base 17: mod_base = OTHER; note = uridine-3'-phosphate
  modified_base 18: mod_base = OTHER; note = guanosine-3'-phosphate
  modified_base 19: mod_base = OTHER; note = adenosine-3'-phosphate
  misc_feature 1..19: note = RNA
  misc_feature 20..21: note = DNA
agtgaatgtcaccaagtgatt

SEQ ID NO: 2605 - DNA, 21 bp, synthetic construct
  source 1..21: mol_type = other DNA
  modified_base 1: mod_base = OTHER; note = adenosine-3'-phosphate
  modified_base 2: mod_base = OTHER; note = guanosine-3'-phosphate
  modified_base 3: mod_base = OTHER; note = adenosine-3'-phosphate
  modified_base 4: mod_base = OTHER; note = guanosine-3'-phosphate
  modified_base 5: mod_base = OTHER; note = guanosine-3'-phosphate
  modified_base 6: mod_base = OTHER; note = adenosine-3'-phosphate
  modified_base 7: mod_base = OTHER; note = adenosine-3'-phosphate
  modified_base 8: mod_base = OTHER; note = guanosine-3'-phosphate
  modified_base 9: mod_base = OTHER; note = cytidine-3'-phosphate
  modified_base 10: mod_base = OTHER; note = adenosine-3'-phosphate
  modified_base 11: mod_base = OTHER; note = cytidine-3'-phosphate
  modified_base 12: mod_base = OTHER; note = adenosine-3'-phosphate
  modified_base 13: mod_base = OTHER; note = guanosine-3'-phosphate
  modified_base 14: mod_base = OTHER; note = uridine-3'-phosphate
  modified_base 15: mod_base = OTHER; note = guanosine-3'-phosphate
  modified_base 16: mod_base = OTHER; note = adenosine-3'-phosphate
  modified_base 17: mod_base = OTHER; note = adenosine-3'-phosphate
  modified_base 18: mod_base = OTHER; note = uridine-3'-phosphate
  modified_base 19: mod_base = OTHER; note = guanosine-3'-phosphate
  misc_feature 1..19: note = RNA
  misc_feature 20..21: note = DNA
agaggaagcacagtgaatgtt

SEQ ID NO: 2606 - DNA, 21 bp, synthetic construct
  source 1..21: mol_type = other DNA
  modified_base 1: mod_base = OTHER; note = guanosine-3'-phosphate
  modified_base 2: mod_base = OTHER; note = uridine-3'-phosphate
  modified_base 3: mod_base = OTHER; note = uridine-3'-phosphate
  modified_base 4: mod_base = OTHER; note = guanosine-3'-phosphate
  modified_base 5: mod_base = OTHER; note = uridine-3'-phosphate
  modified_base 6: mod_base = OTHER; note = guanosine-3'-phosphate
  modified_base 7: mod_base = OTHER; note = adenosine-3'-phosphate
  modified_base 8: mod_base = OTHER; note = adenosine-3'-phosphate
  modified_base 9: mod_base = OTHER; note = guanosine-3'-phosphate
  modified_base 10: mod_base = OTHER; note = guanosine-3'-phosphate
  modified_base 11: mod_base = OTHER; note = cytidine-3'-phosphate
  modified_base 12: mod_base = OTHER; note = cytidine-3'-phosphate
  modified_base 13: mod_base = OTHER; note = adenosine-3'-phosphate
  modified_base 14: mod_base = OTHER; note = adenosine-3'-phosphate
  modified_base 15: mod_base = OTHER; note = uridine-3'-phosphate
  modified_base 16: mod_base = OTHER; note = uridine-3'-phosphate
  modified_base 17: mod_base = OTHER; note = uridine-3'-phosphate
  modified_base 18: mod_base = OTHER; note = cytidine-3'-phosphate
  modified_base 19: mod_base = OTHER; note = cytidine-3'-phosphate
  misc_feature 1..19: note = RNA
  misc_feature 20..21: note = DNA
gttgtgaaggccaatttcctt

SEQ ID NO: 2607 - DNA, 21 bp, synthetic construct
  source 1..21: mol_type = other DNA
  modified_base 1: mod_base = OTHER; note = adenosine-3'-phosphate
  modified_base 2: mod_base = OTHER; note = adenosine-3'-phosphate
  modified_base 3: mod_base = OTHER; note = adenosine-3'-phosphate
  modified_base 4: mod_base = OTHER; note = adenosine-3'-phosphate
  modified_base 5: mod_base = OTHER; note = adenosine-3'-phosphate
  modified_base 6: mod_base = OTHER; note = uridine-3'-phosphate
  modified_base 7: mod_base = OTHER; note = uridine-3'-phosphate
  modified_base 8: mod_base = OTHER; note = guanosine-3'-phosphate
  modified_base 9: mod_base = OTHER; note = adenosine-3'-phosphate
  modified_base 10: mod_base = OTHER; note = uridine-3'-phosphate
  modified_base 11: mod_base = OTHER; note = guanosine-3'-phosphate
  modified_base 12: mod_base = OTHER; note = uridine-3'-phosphate
  modified_base 13: mod_base = OTHER; note = uridine-3'-phosphate
  modified_base 14: mod_base = OTHER; note = guanosine-3'-phosphate
  modified_base 15: mod_base = OTHER; note = uridine-3'-phosphate
  modified_base 16: mod_base = OTHER; note = guanosine-3'-phosphate
  modified_base 17: mod_base = OTHER; note = adenosine-3'-phosphate
  modified_base 18: mod_base = OTHER; note = adenosine-3'-phosphate
  modified_base 19: mod_base = OTHER; note = guanosine-3'-phosphate
  misc_feature 1..19: note = RNA
  misc_feature 20..21: note = DNA
aaaaattgatgttgtgaagtt

SEQ ID NO: 2608 - DNA, 21 bp, synthetic construct
  source 1..21: mol_type = other DNA
  modified_base 1: mod_base = OTHER; note = adenosine-3'-phosphate
  modified_base 2: mod_base = OTHER; note = adenosine-3'-phosphate
  modified_base 3: mod_base = OTHER; note = guanosine-3'-phosphate
  modified_base 4: mod_base = OTHER; note = uridine-3'-phosphate
  modified_base 5: mod_base = OTHER; note = cytidine-3'-phosphate
  modified_base 6: mod_base = OTHER; note = uridine-3'-phosphate
  modified_base 7: mod_base = OTHER; note = cytidine-3'-phosphate
  modified_base 8: mod_base = OTHER; note = cytidine-3'-phosphate
  modified_base 9: mod_base = OTHER; note = adenosine-3'-phosphate
  modified_base 10: mod_base = OTHER; note = guanosine-3'-phosphate
  modified_base 11: mod_base = OTHER; note = uridine-3'-phosphate
  modified_base 12: mod_base = OTHER; note = guanosine-3'-phosphate
  modified_base 13: mod_base = OTHER; note = adenosine-3'-phosphate
  modified_base 14: mod_base = OTHER; note = adenosine-3'-phosphate
  modified_base 15: mod_base = OTHER; note = adenosine-3'-phosphate
  modified_base 16: mod_base = OTHER; note = adenosine-3'-phosphate
  modified_base 17: mod_base = OTHER; note = adenosine-3'-phosphate
  modified_base 18: mod_base = OTHER; note = uridine-3'-phosphate
  modified_base 19: mod_base = OTHER; note = uridine-3'-phosphate
  misc_feature 1..19: note = RNA
  misc_feature 20..21: note = DNA
aagtctccagtgaaaaatttt

SEQ ID NO: 2609 - DNA, 21 bp, synthetic construct
  source 1..21: mol_type = other DNA
  modified_base 1: mod_base = OTHER; note = uridine-3'-phosphate
  modified_base 2: mod_base = OTHER; note = uridine-3'-phosphate
  modified_base 3: mod_base = OTHER; note = cytidine-3'-phosphate
  modified_base 4: mod_base = OTHER; note = cytidine-3'-phosphate
  modified_base 5: mod_base = OTHER; note = adenosine-3'-phosphate
  modified_base 6: mod_base = OTHER; note = adenosine-3'-phosphate
  modified_base 7: mod_base = OTHER; note = adenosine-3'-phosphate
  modified_base 8: mod_base = OTHER; note = cytidine-3'-phosphate
  modified_base 9: mod_base = OTHER; note = cytidine-3'-phosphate
  modified_base 10: mod_base = OTHER; note = adenosine-3'-phosphate
  modified_base 11: mod_base = OTHER; note = adenosine-3'-phosphate
  modified_base 12: mod_base = OTHER; note = guanosine-3'-phosphate
  modified_base 13: mod_base = OTHER; note = uridine-3'-phosphate
  modified_base 14: mod_base = OTHER; note = cytidine-3'-phosphate
  modified_base 15: mod_base = OTHER; note = uridine-3'-phosphate
  modified_base 16: mod_base = OTHER; note = cytidine-3'-phosphate
  modified_base 17: mod_base = OTHER; note = cytidine-3'-phosphate
  modified_base 18: mod_base = OTHER; note = adenosine-3'-phosphate
  modified_base 19: mod_base = OTHER; note = guanosine-3'-phosphate
  misc_feature 1..19: note = RNA
  misc_feature 20..21: note = DNA
ttccaaaccaagtctccagtt

SEQ ID NO: 2610 - DNA, 21 bp, synthetic construct
  source 1..21: mol_type = other DNA
  modified_base 1: mod_base = OTHER; note = adenosine-3'-phosphate
  modified_base 2: mod_base = OTHER; note = adenosine-3'-phosphate
  modified_base 3: mod_base = OTHER; note = guanosine-3'-phosphate
  modified_base 4: mod_base = OTHER; note = adenosine-3'-phosphate
  modified_base 5: mod_base = OTHER; note = uridine-3'-phosphate
  modified_base 6: mod_base = OTHER; note = uridine-3'-phosphate
  modified_base 7: mod_base = OTHER; note = uridine-3'-phosphate
  modified_base 8: mod_base = OTHER; note = cytidine-3'-phosphate
  modified_base 9: mod_base = OTHER; note = uridine-3'-phosphate
  modified_base 10: mod_base = OTHER; note = uridine-3'-phosphate
  modified_base 11: mod_base = OTHER; note = uridine-3'-phosphate
  modified_base 12: mod_base = OTHER; note = uridine-3'-phosphate
  modified_base 13: mod_base = OTHER; note = cytidine-3'-phosphate
  modified_base 14: mod_base = OTHER; note = cytidine-3'-phosphate
  modified_base 15: mod_base = OTHER; note = adenosine-3'-phosphate
  modified_base 16: mod_base = OTHER; note = adenosine-3'-phosphate
  modified_base 17: mod_base = OTHER; note = adenosine-3'-phosphate
  modified_base 18: mod_base = OTHER; note = cytidine-3'-phosphate
  modified_base 19: mod_base = OTHER; note = cytidine-3'-phosphate
  misc_feature 1..19: note = RNA
  misc_feature 20..21: note = DNA
aagatttcttttccaaacctt

SEQ ID NO: 2611 - DNA, 21 bp, synthetic construct
  source 1..21: mol_type = other DNA
  modified_base 1: mod_base = OTHER; note = uridine-3'-phosphate
  modified_base 2: mod_base = OTHER; note = adenosine-3'-phosphate
  modified_base 3: mod_base = OTHER; note = adenosine-3'-phosphate
  modified_base 4: mod_base = OTHER; note = uridine-3'-phosphate
  modified_base 5: mod_base = OTHER; note = guanosine-3'-phosphate
  modified_base 6: mod_base = OTHER; note = uridine-3'-phosphate
  modified_base 7: mod_base = OTHER; note = uridine-3'-phosphate
  modified_base 8: mod_base = OTHER; note = uridine-3'-phosphate
  modified_base 9: mod_base = OTHER; note = uridine-3'-phosphate
  modified_base 10: mod_base = OTHER; note = uridine-3'-phosphate
  modified_base 11: mod_base = OTHER; note = adenosine-3'-phosphate
  modified_base 12: mod_base = OTHER; note = cytidine-3'-phosphate
  modified_base 13: mod_base = OTHER; note = uridine-3'-phosphate
  modified_base 14: mod_base = OTHER; note = adenosine-3'-phosphate
  modified_base 15: mod_base = OTHER; note = adenosine-3'-phosphate
  modified_base 16: mod_base = OTHER; note = guanosine-3'-phosphate
  modified_base 17: mod_base = OTHER; note = adenosine-3'-phosphate
  modified_base 18: mod_base = OTHER; note = uridine-3'-phosphate
  modified_base 19: mod_base = OTHER; note = uridine-3'-phosphate
  misc_feature 1..19: note = RNA
  misc_feature 20..21: note = DNA
taatgtttttactaagatttt

SEQ ID NO: 2612 - DNA, 21 bp, synthetic construct
  source 1..21: mol_type = other DNA
  modified_base 1: mod_base = OTHER; note = cytidine-3'-phosphate
  modified_base 2: mod_base = OTHER; note = adenosine-3'-phosphate
  modified_base 3: mod_base = OTHER; note = cytidine-3'-phosphate
  modified_base 4: mod_base = OTHER; note = cytidine-3'-phosphate
  modified_base 5: mod_base = OTHER; note = adenosine-3'-phosphate
  modified_base 6: mod_base = OTHER; note = cytidine-3'-phosphate
  modified_base 7: mod_base = OTHER; note = uridine-3'-phosphate
  modified_base 8: mod_base = OTHER; note = cytidine-3'-phosphate
  modified_base 9: mod_base = OTHER; note = guanosine-3'-phosphate
  modified_base 10: mod_base = OTHER; note = uridine-3'-phosphate
  modified_base 11: mod_base = OTHER; note = adenosine-3'-phosphate
  modified_base 12: mod_base = OTHER; note = adenosine-3'-phosphate
  modified_base 13: mod_base = OTHER; note = uridine-3'-phosphate
  modified_base 14: mod_base = OTHER; note = guanosine-3'-phosphate
  modified_base 15: mod_base = OTHER; note = uridine-3'-phosphate
  modified_base 16: mod_base = OTHER; note = uridine-3'-phosphate
  modified_base 17: mod_base = OTHER; note = uridine-3'-phosphate
  modified_base 18: mod_base = OTHER; note = uridine-3'-phosphate
  modified_base 19: mod_base = OTHER; note = uridine-3'-phosphate
  misc_feature 1..19: note = RNA
  misc_feature 20..21: note = DNA
caccactcgtaatgttttttt

SEQ ID NO: 2613 - DNA, 21 bp, synthetic construct
  source 1..21: mol_type = other DNA
  modified_base 1: mod_base = OTHER; note = adenosine-3'-phosphate
  modified_base 2: mod_base = OTHER; note = cytidine-3'-phosphate
  modified_base 3: mod_base = OTHER; note = adenosine-3'-phosphate
  modified_base 4: mod_base = OTHER; note = cytidine-3'-phosphate
  modified_base 5: mod_base = OTHER; note = cytidine-3'-phosphate
  modified_base 6: mod_base = OTHER; note = uridine-3'-phosphate
  modified_base 7: mod_base = OTHER; note = uridine-3'-phosphate
  modified_base 8: mod_base = OTHER; note = cytidine-3'-phosphate
  modified_base 9: mod_base = OTHER; note = uridine-3'-phosphate
  modified_base 10: mod_base = OTHER; note = guanosine-3'-phosphate
  modified_base 11: mod_base = OTHER; note = guanosine-3'-phosphate
  modified_base 12: mod_base = OTHER; note = cytidine-3'-phosphate
  modified_base 13: mod_base = OTHER; note = adenosine-3'-phosphate
  modified_base 14: mod_base = OTHER; note = cytidine-3'-phosphate
  modified_base 15: mod_base = OTHER; note = cytidine-3'-phosphate
  modified_base 16: mod_base = OTHER; note = adenosine-3'-phosphate
  modified_base 17: mod_base = OTHER; note = cytidine-3'-phosphate
  modified_base 18: mod_base = OTHER; note = uridine-3'-phosphate
  modified_base 19: mod_base = OTHER; note = cytidine-3'-phosphate
  misc_feature 1..19: note = RNA
  misc_feature 20..21: note = DNA
acaccttctggcaccactctt

SEQ ID NO: 2614 - DNA, 21 bp, synthetic construct
  source 1..21: mol_type = other DNA
  modified_base 1: mod_base = OTHER; note = uridine-3'-phosphate
  modified_base 2: mod_base = OTHER; note = uridine-3'-phosphate
  modified_base 3: mod_base = OTHER; note = cytidine-3'-phosphate
  modified_base 4: mod_base = OTHER; note = cytidine-3'-phosphate
  modified_base 5: mod_base = OTHER; note = cytidine-3'-phosphate
  modified_base 6: mod_base = OTHER; note = uridine-3'-phosphate
  modified_base 7: mod_base = OTHER; note = uridine-3'-phosphate
  modified_base 8: mod_base = OTHER; note = uridine-3'-phosphate
  modified_base 9: mod_base = OTHER; note = uridine-3'-phosphate
  modified_base 10: mod_base = OTHER; note = guanosine-3'-phosphate
  modified_base 11: mod_base = OTHER; note = adenosine-3'-phosphate
  modified_base 12: mod_base = OTHER; note = cytidine-3'-phosphate
  modified_base 13: mod_base = OTHER; note = adenosine-3'-phosphate
  modified_base 14: mod_base = OTHER; note = cytidine-3'-phosphate
  modified_base 15: mod_base = OTHER; note = cytidine-3'-phosphate
  modified_base 16: mod_base = OTHER; note = uridine-3'-phosphate
  modified_base 17: mod_base = OTHER; note = uridine-3'-phosphate
  modified_base 18: mod_base = OTHER; note = cytidine-3'-phosphate
  modified_base 19: mod_base = OTHER; note = uridine-3'-phosphate
  misc_feature 1..19: note = RNA
  misc_feature 20..21: note = DNA
ttcccttttgacaccttcttt

SEQ ID NO: 2615 - DNA, 21 bp, synthetic construct
  source 1..21: mol_type = other DNA
  modified_base 1: mod_base = OTHER; note = adenosine-3'-phosphate
  modified_base 2: mod_base = OTHER; note = uridine-3'-phosphate
  modified_base 3: mod_base = OTHER; note = adenosine-3'-phosphate
  modified_base 4: mod_base = OTHER; note = guanosine-3'-phosphate
  modified_base 5: mod_base = OTHER; note = cytidine-3'-phosphate
  modified_base 6: mod_base = OTHER; note = uridine-3'-phosphate
  modified_base 7: mod_base = OTHER; note = uridine-3'-phosphate
  modified_base 8: mod_base = OTHER; note = uridine-3'-phosphate
  modified_base 9: mod_base = OTHER; note = cytidine-3'-phosphate
  modified_base 10: mod_base = OTHER; note = cytidine-3'-phosphate
  modified_base 11: mod_base = OTHER; note = cytidine-3'-phosphate
  modified_base 12: mod_base = OTHER; note = uridine-3'-phosphate
  modified_base 13: mod_base = OTHER; note = uridine-3'-phosphate
  modified_base 14: mod_base = OTHER; note = uridine-3'-phosphate
  modified_base 15: mod_base = OTHER; note = uridine-3'-phosphate
  modified_base 16: mod_base = OTHER; note = guanosine-3'-phosphate
  modified_base 17: mod_base = OTHER; note = adenosine-3'-phosphate
  modified_base 18: mod_base = OTHER; note = cytidine-3'-phosphate
  modified_base 19: mod_base = OTHER; note = adenosine-3'-phosphate
  misc_feature 1..19: note = RNA
  misc_feature 20..21: note = DNA
atagctttcccttttgacatt

SEQ ID NO: 2616 - DNA, 21 bp, synthetic construct
  source 1..21: mol_type = other DNA
  modified_base 1: mod_base = OTHER; note = adenosine-3'-phosphate
  modified_base 2: mod_base = OTHER; note = adenosine-3'-phosphate
  modified_base 3: mod_base = OTHER; note = adenosine-3'-phosphate
  modified_base 4: mod_base = OTHER; note = guanosine-3'-phosphate
  modified_base 5: mod_base = OTHER; note = uridine-3'-phosphate
  modified_base 6: mod_base = OTHER; note = adenosine-3'-phosphate
  modified_base 7: mod_base = OTHER; note = adenosine-3'-phosphate
  modified_base 8: mod_base = OTHER; note = cytidine-3'-phosphate
  modified_base 9: mod_base = OTHER; note = adenosine-3'-phosphate
  modified_base 10: mod_base = OTHER; note = cytidine-3'-phosphate
  modified_base 11: mod_base = OTHER; note = cytidine-3'-phosphate
  modified_base 12: mod_base = OTHER; note = adenosine-3'-phosphate
  modified_base 13: mod_base = OTHER; note = guanosine-3'-phosphate
  modified_base 14: mod_base = OTHER; note = adenosine-3'-phosphate
  modified_base 15: mod_base = OTHER; note = adenosine-3'-phosphate
  modified_base 16: mod_base = OTHER; note = uridine-3'-phosphate
  modified_base 17: mod_base = OTHER; note = adenosine-3'-phosphate
  modified_base 18: mod_base = OTHER; note = guanosine-3'-phosphate
  modified_base 19: mod_base = OTHER; note = cytidine-3'-phosphate
  misc_feature 1..19: note = RNA
  misc_feature 20..21: note = DNA
aaagtaacaccagaatagctt

SEQ ID NO: 2617 - DNA, 21 bp, synthetic construct
  source 1..21: mol_type = other DNA
  modified_base 1: mod_base = OTHER; note = cytidine-3'-phosphate
  modified_base 2: mod_base = OTHER; note = uridine-3'-phosphate
  modified_base 3: mod_base = OTHER; note = adenosine-3'-phosphate
  modified_base 4: mod_base = OTHER; note = guanosine-3'-phosphate
  modified_base 5: mod_base = OTHER; note = guanosine-3'-phosphate
  modified_base 6: mod_base = OTHER; note = adenosine-3'-phosphate
  modified_base 7: mod_base = OTHER; note = uridine-3'-phosphate
  modified_base 8: mod_base = OTHER; note = cytidine-3'-phosphate
  modified_base 9: mod_base = OTHER; note = cytidine-3'-phosphate
  modified_base 10: mod_base = OTHER; note = adenosine-3'-phosphate
  modified_base 11: mod_base = OTHER; note = adenosine-3'-phosphate
  modified_base 12: mod_base = OTHER; note = adenosine-3'-phosphate
  modified_base 13: mod_base = OTHER; note = guanosine-3'-phosphate
  modified_base 14: mod_base = OTHER; note = uridine-3'-phosphate
  modified_base 15: mod_base = OTHER; note = adenosine-3'-phosphate
  modified_base 16: mod_base = OTHER; note = adenosine-3'-phosphate
  modified_base 17: mod_base = OTHER; note = cytidine-3'-phosphate
  modified_base 18: mod_base = OTHER; note = adenosine-3'-phosphate
  modified_base 19: mod_base = OTHER; note = cytidine-3'-phosphate
  misc_feature 1..19: note = RNA
  misc_feature 20..21: note = DNA
ctaggatccaaagtaacactt

SEQ ID NO: 2618 - DNA, 21 bp, synthetic construct
  source 1..21: mol_type = other DNA
  modified_base 1: mod_base = OTHER; note = adenosine-3'-phosphate
  modified_base 2: mod_base = OTHER; note = uridine-3'-phosphate
  modified_base 3: mod_base = OTHER; note = adenosine-3'-phosphate
  modified_base 4: mod_base = OTHER; note = adenosine-3'-phosphate
  modified_base 5: mod_base = OTHER; note = adenosine-3'-phosphate
  modified_base 6: mod_base = OTHER; note = uridine-3'-phosphate
  modified_base 7: mod_base = OTHER; note = adenosine-3'-phosphate
  modified_base 8: mod_base = OTHER; note = cytidine-3'-phosphate
  modified_base 9: mod_base = OTHER; note = cytidine-3'-phosphate
  modified_base 10: mod_base = OTHER; note = cytidine-3'-phosphate
  modified_base 11: mod_base = OTHER; note = cytidine-3'-phosphate
  modified_base 12: mod_base = OTHER; note = uridine-3'-phosphate
  modified_base 13: mod_base = OTHER; note = adenosine-3'-phosphate
  modified_base 14: mod_base = OTHER; note = guanosine-3'-phosphate
  modified_base 15: mod_base = OTHER; note = guanosine-3'-phosphate
  modified_base 16: mod_base = OTHER; note = adenosine-3'-phosphate
  modified_base 17: mod_base = OTHER; note = uridine-3'-phosphate
  modified_base 18: mod_base = OTHER; note = cytidine-3'-phosphate
  modified_base 19: mod_base = OTHER; note = cytidine-3'-phosphate
  misc_feature 1..19: note = RNA
  misc_feature 20..21: note = DNA
ataaatacccctaggatcctt

SEQ ID NO: 2619 - DNA, 21 bp, synthetic construct
  source 1..21: mol_type = other DNA
  modified_base 1: mod_base = OTHER; note = uridine-3'-phosphate
  modified_base 2: mod_base = OTHER; note = adenosine-3'-phosphate
  modified_base 3: mod_base = OTHER; note = adenosine-3'-phosphate
  modified_base 4: mod_base = OTHER; note = uridine-3'-phosphate
  modified_base 5: mod_base = OTHER; note = guanosine-3'-phosphate
  modified_base 6: mod_base = OTHER; note = guanosine-3'-phosphate
  modified_base 7: mod_base = OTHER; note = uridine-3'-phosphate
  modified_base 8: mod_base = OTHER; note = adenosine-3'-phosphate
  modified_base 9: mod_base = OTHER; note = cytidine-3'-phosphate
  modified_base 10: mod_base = OTHER; note = cytidine-3'-phosphate
  modified_base 11: mod_base = OTHER; note = adenosine-3'-phosphate
  modified_base 12: mod_base = OTHER; note = uridine-3'-phosphate
  modified_base 13: mod_base = OTHER; note = adenosine-3'-phosphate
  modified_base 14: mod_base = OTHER; note = adenosine-3'-phosphate
  modified_base 15: mod_base = OTHER; note = adenosine-3'-phosphate
  modified_base 16: mod_base = OTHER; note = uridine-3'-phosphate
  modified_base 17: mod_base = OTHER; note = adenosine-3'-phosphate
  modified_base 18: mod_base = OTHER; note = cytidine-3'-phosphate
  modified_base 19: mod_base = OTHER; note = cytidine-3'-phosphate
  misc_feature 1..19: note = RNA
  misc_feature 20..21: note = DNA
taatggtaccataaatacctt

SEQ ID NO: 2620 - DNA, 21 bp, synthetic construct
  source 1..21: mol_type = other DNA
  modified_base 1: mod_base = OTHER; note = uridine-3'-phosphate
  modified_base 2: mod_base = OTHER; note = uridine-3'-phosphate
  modified_base 3: mod_base = OTHER; note = uridine-3'-phosphate
  modified_base 4: mod_base = OTHER; note = cytidine-3'-phosphate
  modified_base 5: mod_base = OTHER; note = guanosine-3'-phosphate
  modified_base 6: mod_base = OTHER; note = uridine-3'-phosphate
  modified_base 7: mod_base = OTHER; note = cytidine-3'-phosphate
  modified_base 8: mod_base = OTHER; note = uridine-3'-phosphate
  modified_base 9: mod_base = OTHER; note = guanosine-3'-phosphate
  modified_base 10: mod_base = OTHER; note = cytidine-3'-phosphate
  modified_base 11: mod_base = OTHER; note = uridine-3'-phosphate
  modified_base 12: mod_base = OTHER; note = adenosine-3'-phosphate
  modified_base 13: mod_base = OTHER; note = adenosine-3'-phosphate
  modified_base 14: mod_base = OTHER; note = uridine-3'-phosphate
  modified_base 15: mod_base = OTHER; note = guanosine-3'-phosphate
  modified_base 16: mod_base = OTHER; note = guanosine-3'-phosphate
  modified_base 17: mod_base = OTHER; note = uridine-3'-phosphate
  modified_base 18: mod_base = OTHER; note = adenosine-3'-phosphate
  modified_base 19: mod_base = OTHER; note = cytidine-3'-phosphate
  misc_feature 1..19: note = RNA
  misc_feature 20..21: note = DNA
tttcgtctgctaatggtactt

SEQ ID NO: 2621 - DNA, 21 bp, synthetic construct
  source 1..21: mol_type = other DNA
  modified_base 1: mod_base = OTHER; note = uridine-3'-phosphate
  modified_base 2: mod_base = OTHER; note = guanosine-3'-phosphate
  modified_base 3: mod_base = OTHER; note = guanosine-3'-phosphate
  modified_base 4: mod_base = OTHER; note = guanosine-3'-phosphate
  modified_base 5: mod_base = OTHER; note = adenosine-3'-phosphate
  modified_base 6: mod_base = OTHER; note = adenosine-3'-phosphate
  modified_base 7: mod_base = OTHER; note = cytidine-3'-phosphate
  modified_base 8: mod_base = OTHER; note = uridine-3'-phosphate
  modified_base 9: mod_base = OTHER; note = cytidine-3'-phosphate
  modified_base 10: mod_base = OTHER; note = cytidine-3'-phosphate
  modified_base 11: mod_base = OTHER; note = uridine-3'-phosphate
  modified_base 12: mod_base = OTHER; note = uridine-3'-phosphate
  modified_base 13: mod_base = OTHER; note = uridine-3'-phosphate
  modified_base 14: mod_base = OTHER; note = cytidine-3'-phosphate
  modified_base 15: mod_base = OTHER; note = guanosine-3'-phosphate
  modified_base 16: mod_base = OTHER; note = uridine-3'-phosphate
  modified_base 17: mod_base = OTHER; note = cytidine-3'-phosphate
  modified_base 18: mod_base = OTHER; note = uridine-3'-phosphate
  modified_base 19: mod_base = OTHER; note = guanosine-3'-phosphate
  misc_feature 1..19: note = RNA
  misc_feature 20..21: note = DNA
tgggaactcctttcgtctgtt

SEQ ID NO: 2622 - DNA, 21 bp, synthetic construct
  source 1..21: mol_type = other DNA
  modified_base 1: mod_base = OTHER; note = adenosine-3'-phosphate
  modified_base 2: mod_base = OTHER; note = uridine-3'-phosphate
  modified_base 3: mod_base = OTHER; note = cytidine-3'-phosphate
  modified_base 4: mod_base = OTHER; note = cytidine-3'-phosphate
  modified_base 5: mod_base = OTHER; note = uridine-3'-phosphate
  modified_base 6: mod_base = OTHER; note = guanosine-3'-phosphate
  modified_base 7: mod_base = OTHER; note = uridine-3'-phosphate
  modified_base 8: mod_base = OTHER; note = adenosine-3'-phosphate
  modified_base 9: mod_base = OTHER; note = uridine-3'-phosphate
  modified_base 10: mod_base = OTHER; note = guanosine-3'-phosphate
  modified_base 11: mod_base = OTHER; note = guanosine-3'-phosphate
  modified_base 12: mod_base = OTHER; note = guanosine-3'-phosphate
  modified_base 13: mod_base = OTHER; note = adenosine-3'-phosphate
  modified_base 14: mod_base = OTHER; note = adenosine-3'-phosphate
  modified_base 15: mod_base = OTHER; note = cytidine-3'-phosphate
  modified_base 16: mod_base = OTHER; note = uridine-3'-phosphate
  modified_base 17: mod_base = OTHER; note = cytidine-3'-phosphate
  modified_base 18: mod_base = OTHER; note = cytidine-3'-phosphate
  modified_base 19: mod_base = OTHER; note = uridine-3'-phosphate
  misc_feature 1..19: note = RNA
  misc_feature 20..21: note = DNA
atcctgtatgggaactccttt

SEQ ID NO: 2623 - DNA, 21 bp, synthetic construct
  source 1..21: mol_type = other DNA
  modified_base 1: mod_base = OTHER; note = uridine-3'-phosphate
  modified_base 2: mod_base = OTHER; note = cytidine-3'-phosphate
  modified_base 3: mod_base = OTHER; note = uridine-3'-phosphate
  modified_base 4: mod_base = OTHER; note = adenosine-3'-phosphate
  modified_base 5: mod_base = OTHER; note = adenosine-3'-phosphate
  modified_base 6: mod_base = OTHER; note = guanosine-3'-phosphate
  modified_base 7: mod_base = OTHER; note = guanosine-3'-phosphate
  modified_base 8: mod_base = OTHER; note = guanosine-3'-phosphate
  modified_base 9: mod_base = OTHER; note = uridine-3'-phosphate
  modified_base 10: mod_base = OTHER; note = adenosine-3'-phosphate
  modified_base 11: mod_base = OTHER; note = uridine-3'-phosphate
  modified_base 12: mod_base = OTHER; note = cytidine-3'-phosphate
  modified_base 13: mod_base = OTHER; note = cytidine-3'-phosphate
  modified_base 14: mod_base = OTHER; note = uridine-3'-phosphate
  modified_base 15: mod_base = OTHER; note = guanosine-3'-phosphate
  modified_base 16: mod_base = OTHER; note = uridine-3'-phosphate
  modified_base 17: mod_base = OTHER; note = adenosine-3'-phosphate
  modified_base 18: mod_base = OTHER; note = uridine-3'-phosphate
  modified_base 19: mod_base = OTHER; note = guanosine-3'-phosphate
  misc_feature 1..19: note = RNA
  misc_feature 20..21: note = DNA
tctaagggtatcctgtatgtt

SEQ ID NO: 2624 - DNA, 21 bp, synthetic construct
  source 1..21: mol_type = other DNA
  modified_base 1: mod_base = OTHER; note = uridine-3'-phosphate
  modified_base 2: mod_base = OTHER; note = uridine-3'-phosphate
  modified_base 3: mod_base = OTHER; note = uridine-3'-phosphate
  modified_base 4: mod_base = OTHER; note = guanosine-3'-phosphate
  modified_base 5: mod_base = OTHER; note = guanosine-3'-phosphate
  modified_base 6: mod_base = OTHER; note = guanosine-3'-phosphate
  modified_base 7: mod_base = OTHER; note = guanosine-3'-phosphate
  modified_base 8: mod_base = OTHER; note = adenosine-3'-phosphate
  modified_base 9: mod_base = OTHER; note = cytidine-3'-phosphate
  modified_base 10: mod_base = OTHER; note = cytidine-3'-phosphate
  modified_base 11: mod_base = OTHER; note = adenosine-3'-phosphate
  modified_base 12: mod_base = OTHER; note = adenosine-3'-phosphate
  modified_base 13: mod_base = OTHER; note = adenosine-3'-phosphate
  modified_base 14: mod_base = OTHER; note = uridine-3'-phosphate
  modified_base 15: mod_base = OTHER; note = cytidine-3'-phosphate
  modified_base 16: mod_base = OTHER; note = uridine-3'-phosphate
  modified_base 17: mod_base = OTHER; note = adenosine-3'-phosphate
  modified_base 18: mod_base = OTHER; note = adenosine-3'-phosphate
  modified_base 19: mod_base = OTHER; note = guanosine-3'-phosphate
  misc_feature 1..19: note = RNA
  misc_feature 20..21: note = DNA
tttggggaccaaatctaagtt

SEQ ID NO: 2625 - DNA, 21 bp, synthetic construct
  source 1..21: mol_type = other DNA
  modified_base 1: mod_base = OTHER; note = uridine-3'-phosphate
  modified_base 2: mod_base = OTHER; note = uridine-3'-phosphate
  modified_base 3: mod_base = OTHER; note = guanosine-3'-phosphate
  modified_base 4: mod_base = OTHER; note = adenosine-3'-phosphate
  modified_base 5: mod_base = OTHER; note = uridine-3'-phosphate
  modified_base 6: mod_base = OTHER; note = uridine-3'-phosphate
  modified_base 7: mod_base = OTHER; note = uridine-3'-phosphate
  modified_base 8: mod_base = OTHER; note = cytidine-3'-phosphate
  modified_base 9: mod_base = OTHER; note = uridine-3'-phosphate
  modified_base 10: mod_base = OTHER; note = guanosine-3'-phosphate
  modified_base 11: mod_base = OTHER; note = uridine-3'-phosphate
  modified_base 12: mod_base = OTHER; note = uridine-3'-phosphate
  modified_base 13: mod_base = OTHER; note = uridine-3'-phosphate
  modified_base 14: mod_base = OTHER; note = uridine-3'-phosphate
  modified_base 15: mod_base = OTHER; note = guanosine-3'-phosphate
  modified_base 16: mod_base = OTHER; note = guanosine-3'-phosphate
  modified_base 17: mod_base = OTHER; note = guanosine-3'-phosphate
  modified_base 18: mod_base = OTHER; note = guanosine-3'-phosphate
  modified_base 19: mod_base = OTHER; note = adenosine-3'-phosphate
  misc_feature 1..19: note = RNA
  misc_feature 20..21: note = DNA
ttgatttctgttttggggatt

SEQ ID NO: 2626 - DNA, 21 bp, synthetic construct
  source 1..21: mol_type = other DNA
  modified_base 1: mod_base = OTHER; note = adenosine-3'-phosphate
  modified_base 2: mod_base = OTHER; note = adenosine-3'-phosphate
  modified_base 3: mod_base = OTHER; note = adenosine-3'-phosphate
  modified_base 4: mod_base = OTHER; note = uridine-3'-phosphate
  modified_base 5: mod_base = OTHER; note = cytidine-3'-phosphate
  modified_base 6: mod_base = OTHER; note = cytidine-3'-phosphate
  modified_base 7: mod_base = OTHER; note = uridine-3'-phosphate
  modified_base 8: mod_base = OTHER; note = uridine-3'-phosphate
  modified_base 9: mod_base = OTHER; note = uridine-3'-phosphate
  modified_base 10: mod_base = OTHER; note = uridine-3'-phosphate
  modified_base 11: mod_base = OTHER; note = guanosine-3'-phosphate
  modified_base 12: mod_base = OTHER; note = adenosine-3'-phosphate
  modified_base 13: mod_base = OTHER; note = uridine-3'-phosphate
  modified_base 14: mod_base = OTHER; note = uridine-3'-phosphate
  modified_base 15: mod_base = OTHER; note = uridine-3'-phosphate
  modified_base 16: mod_base = OTHER; note = cytidine-3'-phosphate
  modified_base 17: mod_base = OTHER; note = uridine-3'-phosphate
  modified_base 18: mod_base = OTHER; note = guanosine-3'-phosphate
  modified_base 19: mod_base = OTHER; note = uridine-3'-phosphate
  misc_feature 1..19: note = RNA
  misc_feature 20..21: note = DNA
aaatccttttgatttctgttt

SEQ ID NO: 2627 - DNA, 21 bp, synthetic construct
  source 1..21: mol_type = other DNA
  modified_base 1: mod_base = OTHER; note = uridine-3'-phosphate
  modified_base 2: mod_base = OTHER; note = uridine-3'-phosphate
  modified_base 3: mod_base = OTHER; note = uridine-3'-phosphate
  modified_base 4: mod_base = OTHER; note = adenosine-3'-phosphate
  modified_base 5: mod_base = OTHER; note = cytidine-3'-phosphate
  modified_base 6: mod_base = OTHER; note = adenosine-3'-phosphate
  modified_base 7: mod_base = OTHER; note = cytidine-3'-phosphate
  modified_base 8: mod_base = OTHER; note = uridine-3'-phosphate
  modified_base 9: mod_base = OTHER; note = cytidine-3'-phosphate
  modified_base 10: mod_base = OTHER; note = adenosine-3'-phosphate
  modified_base 11: mod_base = OTHER; note = adenosine-3'-phosphate
  modified_base 12: mod_base = OTHER; note = adenosine-3'-phosphate
  modified_base 13: mod_base = OTHER; note = adenosine-3'-phosphate
  modified_base 14: mod_base = OTHER; note = uridine-3'-phosphate
  modified_base 15: mod_base = OTHER; note = cytidine-3'-phosphate
  modified_base 16: mod_base = OTHER; note = cytidine-3'-phosphate
  modified_base 17: mod_base = OTHER; note = uridine-3'-phosphate
  modified_base 18: mod_base = OTHER; note = uridine-3'-phosphate
  modified_base 19: mod_base = OTHER; note = uridine-3'-phosphate
  misc_feature 1..19: note = RNA
  misc_feature 20..21: note = DNA
tttacactcaaaatccttttt

SEQ ID NO: 2628 - DNA, 21 bp, synthetic construct
  source 1..21: mol_type = other DNA
  modified_base 1: mod_base = OTHER; note = cytidine-3'-phosphate
  modified_base 2: mod_base = OTHER; note = adenosine-3'-phosphate
  modified_base 3: mod_base = OTHER; note = adenosine-3'-phosphate
  modified_base 4: mod_base = OTHER; note = guanosine-3'-phosphate
  modified_base 5: mod_base = OTHER; note = cytidine-3'-phosphate
  modified_base 6: mod_base = OTHER; note = adenosine-3'-phosphate
  modified_base 7: mod_base = OTHER; note = guanosine-3'-phosphate
  modified_base 8: mod_base = OTHER; note = uridine-3'-phosphate
  modified_base 9: mod_base = OTHER; note = cytidine-3'-phosphate
  modified_base 10: mod_base = OTHER; note = cytidine-3'-phosphate
  modified_base 11: mod_base = OTHER; note = uridine-3'-phosphate
  modified_base 12: mod_base = OTHER; note = uridine-3'-phosphate
  modified_base 13: mod_base = OTHER; note = uridine-3'-phosphate
  modified_base 14: mod_base = OTHER; note = uridine-3'-phosphate
  modified_base 15: mod_base = OTHER; note = adenosine-3'-phosphate
  modified_base 16: mod_base = OTHER; note = cytidine-3'-phosphate
  modified_base 17: mod_base = OTHER; note = adenosine-3'-phosphate
  modified_base 18: mod_base = OTHER; note = cytidine-3'-phosphate
  modified_base 19: mod_base = OTHER; note = uridine-3'-phosphate
  misc_feature 1..19: note = RNA
  misc_feature 20..21: note = DNA
caagcagtccttttacacttt

SEQ ID NO: 2629 - DNA, 21 bp, synthetic construct
  source 1..21: mol_type = other DNA
  modified_base 1: mod_base = OTHER; note = uridine-3'-phosphate
  modified_base 2: mod_base = OTHER; note = cytidine-3'-phosphate
  modified_base 3: mod_base = OTHER; note = adenosine-3'-phosphate
  modified_base 4: mod_base = OTHER; note = cytidine-3'-phosphate
  modified_base 5: mod_base = OTHER; note = cytidine-3'-phosphate
  modified_base 6: mod_base = OTHER; note = uridine-3'-phosphate
  modified_base 7: mod_base = OTHER; note = adenosine-3'-phosphate
  modified_base 8: mod_base = OTHER; note = cytidine-3'-phosphate
  modified_base 9: mod_base = OTHER; note = adenosine-3'-phosphate
  modified_base 10: mod_base = OTHER; note = adenosine-3'-phosphate
  modified_base 11: mod_base = OTHER; note = guanosine-3'-phosphate
  modified_base 12: mod_base = OTHER; note = cytidine-3'-phosphate
  modified_base 13: mod_base = OTHER; note = adenosine-3'-phosphate
  modified_base 14: mod_base = OTHER; note = guanosine-3'-phosphate
  modified_base 15: mod_base = OTHER; note = uridine-3'-phosphate
  modified_base 16: mod_base = OTHER; note = cytidine-3'-phosphate
  modified_base 17: mod_base = OTHER; note = cytidine-3'-phosphate
  modified_base 18: mod_base = OTHER; note = uridine-3'-phosphate
  modified_base 19: mod_base = OTHER; note = uridine-3'-phosphate
  misc_feature 1..19: note = RNA
  misc_feature 20..21: note = DNA
tcacctacaagcagtcctttt

SEQ ID NO: 2630 - DNA, 21 bp, synthetic construct
  source 1..21: mol_type = other DNA
  modified_base 1: mod_base = OTHER; note = cytidine-3'-phosphate
  modified_base 2: mod_base = OTHER; note = adenosine-3'-phosphate
  modified_base 3: mod_base = OTHER; note = guanosine-3'-phosphate
  modified_base 4: mod_base = OTHER; note = adenosine-3'-phosphate
  modified_base 5: mod_base = OTHER; note = cytidine-3'-phosphate
  modified_base 6: mod_base = OTHER; note = adenosine-3'-phosphate
  modified_base 7: mod_base = OTHER; note = adenosine-3'-phosphate
  modified_base 8: mod_base = OTHER; note = guanosine-3'-phosphate
  modified_base 9: mod_base = OTHER; note = adenosine-3'-phosphate
  modified_base 10: mod_base = OTHER; note = uridine-3'-phosphate
  modified_base 11: mod_base = OTHER; note = cytidine-3'-phosphate
  modified_base 12: mod_base = OTHER; note = uridine-3'-phosphate
  modified_base 13: mod_base = OTHER; note = cytidine-3'-phosphate
  modified_base 14: mod_base = OTHER; note = adenosine-3'-phosphate
  modified_base 15: mod_base = OTHER; note = cytidine-3'-phosphate
  modified_base 16: mod_base = OTHER; note = cytidine-3'-phosphate
  modified_base 17: mod_base = OTHER; note = uridine-3'-phosphate
  modified_base 18: mod_base = OTHER; note = adenosine-3'-phosphate
  modified_base 19: mod_base = OTHER; note = cytidine-3'-phosphate
  misc_feature 1..19: note = RNA
  misc_feature 20..21: note = DNA
cagacaagatctcacctactt

SEQ ID NO: 2631 - DNA, 21 bp, synthetic construct
  source 1..21: mol_type = other DNA
  modified_base 1: mod_base = OTHER; note = uridine-3'-phosphate
  modified_base 2: mod_base = OTHER; note = uridine-3'-phosphate
  modified_base 3: mod_base = OTHER; note = adenosine-3'-phosphate
  modified_base 4: mod_base = OTHER; note = guanosine-3'-phosphate
  modified_base 5: mod_base = OTHER; note = adenosine-3'-phosphate
  modified_base 6: mod_base = OTHER; note = adenosine-3'-phosphate
  modified_base 7: mod_base = OTHER; note = cytidine-3'-phosphate
  modified_base 8: mod_base = OTHER; note = uridine-3'-phosphate
  modified_base 9: mod_base = OTHER; note = guanosine-3'-phosphate
  modified_base 10: mod_base = OTHER; note = cytidine-3'-phosphate
  modified_base 11: mod_base = OTHER; note = adenosine-3'-phosphate
  modified_base 12: mod_base = OTHER; note = guanosine-3'-phosphate
  modified_base 13: mod_base = OTHER; note = adenosine-3'-phosphate
  modified_base 14: mod_base = OTHER; note = cytidine-3'-phosphate
  modified_base 15: mod_base = OTHER; note = adenosine-3'-phosphate
  modified_base 16: mod_base = OTHER; note = adenosine-3'-phosphate
  modified_base 17: mod_base = OTHER; note = guanosine-3'-phosphate
  modified_base 18: mod_base = OTHER; note = adenosine-3'-phosphate
  modified_base 19: mod_base = OTHER; note = uridine-3'-phosphate
  misc_feature 1..19: note = RNA
  misc_feature 20..21: note = DNA
ttagaactgcagacaagattt

SEQ ID NO: 2632 - DNA, 21 bp, synthetic construct
  source 1..21: mol_type = other DNA
  modified_base 1: mod_base = OTHER; note = uridine-3'-phosphate
  modified_base 2: mod_base = OTHER; note = guanosine-3'-phosphate
  modified_base 3: mod_base = OTHER; note = cytidine-3'-phosphate
  modified_base 4: mod_base = OTHER; note = cytidine-3'-phosphate
  modified_base 5: mod_base = OTHER; note = uridine-3'-phosphate
  modified_base 6: mod_base = OTHER; note = uridine-3'-phosphate
  modified_base 7: mod_base = OTHER; note = cytidine-3'-phosphate
  modified_base 8: mod_base = OTHER; note = cytidine-3'-phosphate
  modified_base 9: mod_base = OTHER; note = uridine-3'-phosphate
  modified_base 10: mod_base = OTHER; note = guanosine-3'-phosphate
  modified_base 11: mod_base = OTHER; note = adenosine-3'-phosphate
  modified_base 12: mod_base = OTHER; note = cytidine-3'-phosphate
  modified_base 13: mod_base = OTHER; note = uridine-3'-phosphate
  modified_base 14: mod_base = OTHER; note = uridine-3'-phosphate
  modified_base 15: mod_base = OTHER; note = adenosine-3'-phosphate
  modified_base 16: mod_base = OTHER; note = guanosine-3'-phosphate
  modified_base 17: mod_base = OTHER; note = adenosine-3'-phosphate
  modified_base 18: mod_base = OTHER; note = adenosine-3'-phosphate
  modified_base 19: mod_base = OTHER; note = cytidine-3'-phosphate
  misc_feature 1..19: note = RNA
  misc_feature 20..21: note = DNA
tgccttcctgacttagaactt

SEQ ID NO: 2633 - DNA, 21 bp, synthetic construct
  source 1..21: mol_type = other DNA
  modified_base 1: mod_base = OTHER; note = uridine-3'-phosphate
  modified_base 2: mod_base = OTHER; note = uridine-3'-phosphate
  modified_base 3: mod_base = OTHER; note = adenosine-3'-phosphate
  modified_base 4: mod_base = OTHER; note = guanosine-3'-phosphate
  modified_base 5: mod_base = OTHER; note = guanosine-3'-phosphate
  modified_base 6: mod_base = OTHER; note = adenosine-3'-phosphate
  modified_base 7: mod_base = OTHER; note = uridine-3'-phosphate
  modified_base 8: mod_base = OTHER; note = adenosine-3'-phosphate
  modified_base 9: mod_base = OTHER; note = uridine-3'-phosphate
  modified_base 10: mod_base = OTHER; note = uridine-3'-phosphate
  modified_base 11: mod_base = OTHER; note = guanosine-3'-phosphate
  modified_base 12: mod_base = OTHER; note = adenosine-3'-phosphate
  modified_base 13: mod_base = OTHER; note = uridine-3'-phosphate
  modified_base 14: mod_base = OTHER; note = guanosine-3'-phosphate
  modified_base 15: mod_base = OTHER; note = cytidine-3'-phosphate
  modified_base 16: mod_base = OTHER; note = cytidine-3'-phosphate
  modified_base 17: mod_base = OTHER; note = uridine-3'-phosphate
  modified_base 18: mod_base = OTHER; note = uridine-3'-phosphate
  modified_base 19: mod_base = OTHER; note = cytidine-3'-phosphate
  misc_feature 1..19: note = RNA
  misc_feature 20..21: note = DNA
ttaggatattgatgccttctt

SEQ ID NO: 2634 - DNA, 21 bp, synthetic construct
  source 1..21: mol_type = other DNA
  modified_base 1: mod_base = OTHER; note = adenosine-3'-phosphate
  modified_base 2: mod_base = OTHER; note = guanosine-3'-phosphate
  modified_base 3: mod_base = OTHER; note = guanosine-3'-phosphate
  modified_base 4: mod_base = OTHER; note = uridine-3'-phosphate
  modified_base 5: mod_base = OTHER; note = guanosine-3'-phosphate
  modified_base 6: mod_base = OTHER; note = guanosine-3'-phosphate
  modified_base 7: mod_base = OTHER; note = guanosine-3'-phosphate
  modified_base 8: mod_base = OTHER; note = uridine-3'-phosphate
  modified_base 9: mod_base = OTHER; note = uridine-3'-phosphate
  modified_base 10: mod_base = OTHER; note = adenosine-3'-phosphate
  modified_base 11: mod_base = OTHER; note = guanosine-3'-phosphate
  modified_base 12: mod_base = OTHER; note = guanosine-3'-phosphate
  modified_base 13: mod_base = OTHER; note = adenosine-3'-phosphate
  modified_base 14: mod_base = OTHER; note = uridine-3'-phosphate
  modified_base 15: mod_base = OTHER; note = adenosine-3'-phosphate
  modified_base 16: mod_base = OTHER; note = uridine-3'-phosphate
  modified_base 17: mod_base = OTHER; note = uridine-3'-phosphate
  modified_base 18: mod_base = OTHER; note = guanosine-3'-phosphate
  modified_base 19: mod_base = OTHER; note = adenosine-3'-phosphate
  misc_feature 1..19: note = RNA
  misc_feature 20..21: note = DNA
aggtgggttaggatattgatt

SEQ ID NO: 2635 - DNA, 21 bp, synthetic construct
  source 1..21: mol_type = other DNA
  modified_base 1: mod_base = OTHER; note = adenosine-3'-phosphate
  modified_base 2: mod_base = OTHER; note = cytidine-3'-phosphate
  modified_base 3: mod_base = OTHER; note = uridine-3'-phosphate
  modified_base 4: mod_base = OTHER; note = cytidine-3'-phosphate
  modified_base 5: mod_base = OTHER; note = cytidine-3'-phosphate
  modified_base 6: mod_base = OTHER; note = cytidine-3'-phosphate
  modified_base 7: mod_base = OTHER; note = uridine-3'-phosphate
  modified_base 8: mod_base = OTHER; note = uridine-3'-phosphate
  modified_base 9: mod_base = OTHER; note = uridine-3'-phosphate
  modified_base 10: mod_base = OTHER; note = guanosine-3'-phosphate
  modified_base 11: mod_base = OTHER; note = guanosine-3'-phosphate
  modified_base 12: mod_base = OTHER; note = guanosine-3'-phosphate
  modified_base 13: mod_base = OTHER; note = guanosine-3'-phosphate
  modified_base 14: mod_base = OTHER; note = adenosine-3'-phosphate
  modified_base 15: mod_base = OTHER; note = guanosine-3'-phosphate
  modified_base 16: mod_base = OTHER; note = guanosine-3'-phosphate
  modified_base 17: mod_base = OTHER; note = uridine-3'-phosphate
  modified_base 18: mod_base = OTHER; note = guanosine-3'-phosphate
  modified_base 19: mod_base = OTHER; note = guanosine-3'-phosphate
  misc_feature 1..19: note = RNA
  misc_feature 20..21: note = DNA
actccctttggggaggtggtt

SEQ ID NO: 2636 - DNA, 21 bp, synthetic construct
  source 1..21: mol_type = other DNA
  modified_base 1: mod_base = OTHER; note = cytidine-3'-phosphate
  modified_base 2: mod_base = OTHER; note = uridine-3'-phosphate
  modified_base 3: mod_base = OTHER; note = cytidine-3'-phosphate
  modified_base 4: mod_base = OTHER; note = uridine-3'-phosphate
  modified_base 5: mod_base = OTHER; note = guanosine-3'-phosphate
  modified_base 6: mod_base = OTHER; note = cytidine-3'-phosphate
  modified_base 7: mod_base = OTHER; note = adenosine-3'-phosphate
  modified_base 8: mod_base = OTHER; note = cytidine-3'-phosphate
  modified_base 9: mod_base = OTHER; note = uridine-3'-phosphate
  modified_base 10: mod_base = OTHER; note = cytidine-3'-phosphate
  modified_base 11: mod_base = OTHER; note = cytidine-3'-phosphate
  modified_base 12: mod_base = OTHER; note = cytidine-3'-phosphate
  modified_base 13: mod_base = OTHER; note = uridine-3'-phosphate
  modified_base 14: mod_base = OTHER; note = uridine-3'-phosphate
  modified_base 15: mod_base = OTHER; note = uridine-3'-phosphate
  modified_base 16: mod_base = OTHER; note = guanosine-3'-phosphate
  modified_base 17: mod_base = OTHER; note = guanosine-3'-phosphate
  modified_base 18: mod_base = OTHER; note = guanosine-3'-phosphate
  modified_base 19: mod_base = OTHER; note = guanosine-3'-phosphate
  misc_feature 1..19: note = RNA
  misc_feature 20..21: note = DNA
ctctgcactccctttggggtt

SEQ ID NO: 2637 - DNA, 21 bp, synthetic construct
  source 1..21: mol_type = other DNA
  modified_base 1: mod_base = OTHER; note = adenosine-3'-phosphate
  modified_base 2: mod_base = OTHER; note = uridine-3'-phosphate
  modified_base 3: mod_base = OTHER; note = cytidine-3'-phosphate
  modified_base 4: mod_base = OTHER; note = adenosine-3'-phosphate
  modified_base 5: mod_base = OTHER; note = guanosine-3'-phosphate
  modified_base 6: mod_base = OTHER; note = cytidine-3'-phosphate
  modified_base 7: mod_base = OTHER; note = uridine-3'-phosphate
  modified_base 8: mod_base = OTHER; note = cytidine-3'-phosphate
  modified_base 9: mod_base = OTHER; note = cytidine-3'-phosphate
  modified_base 10: mod_base = OTHER; note = guanosine-3'-phosphate
  modified_base 11: mod_base = OTHER; note = cytidine-3'-phosphate
  modified_base 12: mod_base = OTHER; note = cytidine-3'-phosphate
  modified_base 13: mod_base = OTHER; note = uridine-3'-phosphate
  modified_base 14: mod_base = OTHER; note = cytidine-3'-phosphate
  modified_base 15: mod_base = OTHER; note = uridine-3'-phosphate
  modified_base 16: mod_base = OTHER; note = guanosine-3'-phosphate
  modified_base 17: mod_base = OTHER; note = cytidine-3'-phosphate
  modified_base 18: mod_base = OTHER; note = adenosine-3'-phosphate
  modified_base 19: mod_base = OTHER; note = cytidine-3'-phosphate
  misc_feature 1..19: note = RNA
  misc_feature 20..21: note = DNA
atcagctccgcctctgcactt

SEQ ID NO: 2638 - DNA, 21 bp, synthetic construct
  source 1..21: mol_type = other DNA
  modified_base 1: mod_base = OTHER; note = guanosine-3'-phosphate
  modified_base 2: mod_base = OTHER; note = adenosine-3'-phosphate
  modified_base 3: mod_base = OTHER; note = cytidine-3'-phosphate
  modified_base 4: mod_base = OTHER; note = adenosine-3'-phosphate
  modified_base 5: mod_base = OTHER; note = adenosine-3'-phosphate
  modified_base 6: mod_base = OTHER; note = cytidine-3'-phosphate
  modified_base 7: mod_base = OTHER; note = guanosine-3'-phosphate
  modified_base 8: mod_base = OTHER; note = cytidine-3'-phosphate
  modified_base 9: mod_base = OTHER; note = uridine-3'-phosphate
  modified_base 10: mod_base = OTHER; note = cytidine-3'-phosphate
  modified_base 11: mod_base = OTHER; note = adenosine-3'-phosphate
  modified_base 12: mod_base = OTHER; note = uridine-3'-phosphate
  modified_base 13: mod_base = OTHER; note = cytidine-3'-phosphate
  modified_base 14: mod_base = OTHER; note = adenosine-3'-phosphate
  modified_base 15: mod_base = OTHER; note = guanosine-3'-phosphate
  modified_base 16: mod_base = OTHER; note = cytidine-3'-phosphate
  modified_base 17: mod_base = OTHER; note = uridine-3'-phosphate
  modified_base 18: mod_base = OTHER; note = cytidine-3'-phosphate
  modified_base 19: mod_base = OTHER; note = cytidine-3'-phosphate
  misc_feature 1..19: note = RNA
  misc_feature 20..21: note = DNA
gacaacgctcatcagctcctt

SEQ ID NO: 2639 - DNA, 21 bp, synthetic construct
  source 1..21: mol_type = other DNA
  modified_base 1: mod_base = OTHER; note = adenosine-3'-phosphate
  modified_base 2: mod_base = OTHER; note = uridine-3'-phosphate
  modified_base 3: mod_base = OTHER; note = adenosine-3'-phosphate
  modified_base 4: mod_base = OTHER; note = guanosine-3'-phosphate
  modified_base 5: mod_base = OTHER; note = adenosine-3'-phosphate
  modified_base 6: mod_base = OTHER; note = adenosine-3'-phosphate
  modified_base 7: mod_base = OTHER; note = uridine-3'-phosphate
  modified_base 8: mod_base = OTHER; note = adenosine-3'-phosphate
  modified_base 9: mod_base = OTHER; note = cytidine-3'-phosphate
  modified_base 10: mod_base = OTHER; note = uridine-3'-phosphate
  modified_base 11: mod_base = OTHER; note = guanosine-3'-phosphate
  modified_base 12: mod_base = OTHER; note = guanosine-3'-phosphate
  modified_base 13: mod_base = OTHER; note = guanosine-3'-phosphate
  modified_base 14: mod_base = OTHER; note = adenosine-3'-phosphate
  modified_base 15: mod_base = OTHER; note = cytidine-3'-phosphate
  modified_base 16: mod_base = OTHER; note = adenosine-3'-phosphate
  modified_base 17: mod_base = OTHER; note = adenosine-3'-phosphate
  modified_base 18: mod_base = OTHER; note = cytidine-3'-phosphate
  modified_base 19: mod_base = OTHER; note = guanosine-3'-phosphate
  misc_feature 1..19: note = RNA
  misc_feature 20..21: note = DNA
atagaatactgggacaacgtt

SEQ ID NO: 2640 - DNA, 21 bp, synthetic construct
  source 1..21: mol_type = other DNA
  modified_base 1: mod_base = OTHER; note = guanosine-3'-phosphate
  modified_base 2: mod_base = OTHER; note = adenosine-3'-phosphate
  modified_base 3: mod_base = OTHER; note = adenosine-3'-phosphate
  modified_base 4: mod_base = OTHER; note = adenosine-3'-phosphate
  modified_base 5: mod_base = OTHER; note = adenosine-3'-phosphate
  modified_base 6: mod_base = OTHER; note = adenosine-3'-phosphate
  modified_base 7: mod_base = OTHER; note = cytidine-3'-phosphate
  modified_base 8: mod_base = OTHER; note = adenosine-3'-phosphate
  modified_base 9: mod_base = OTHER; note = uridine-3'-phosphate
  modified_base 10: mod_base = OTHER; note = adenosine-3'-phosphate
  modified_base 11: mod_base = OTHER; note = guanosine-3'-phosphate
  modified_base 12: mod_base = OTHER; note = adenosine-3'-phosphate
  modified_base 13: mod_base = OTHER; note = adenosine-3'-phosphate
  modified_base 14: mod_base = OTHER; note = uridine-3'-phosphate
  modified_base 15: mod_base = OTHER; note = adenosine-3'-phosphate
  modified_base 16: mod_base = OTHER; note = cytidine-3'-phosphate
  modified_base 17: mod_base = OTHER; note = uridine-3'-phosphate
  modified_base 18: mod_base = OTHER; note = guanosine-3'-phosphate
  modified_base 19: mod_base = OTHER; note = guanosine-3'-phosphate
  misc_feature 1..19: note = RNA
  misc_feature 20..21: note = DNA
gaaaaacatagaatactggtt

SEQ ID NO: 2641 - DNA, 21 bp, synthetic construct
  source 1..21: mol_type = other DNA
  modified_base 1: mod_base = OTHER; note = uridine-3'-phosphate
  modified_base 2: mod_base = OTHER; note = uridine-3'-phosphate
  modified_base 3: mod_base = OTHER; note = uridine-3'-phosphate
  modified_base 4: mod_base = OTHER; note = cytidine-3'-phosphate
  modified_base 5: mod_base = OTHER; note = cytidine-3'-phosphate
  modified_base 6: mod_base = OTHER; note = adenosine-3'-phosphate
  modified_base 7: mod_base = OTHER; note = guanosine-3'-phosphate
  modified_base 8: mod_base = OTHER; note = guanosine-3'-phosphate
  modified_base 9: mod_base = OTHER; note = uridine-3'-phosphate
  modified_base 10: mod_base = OTHER; note = adenosine-3'-phosphate
  modified_base 11: mod_base = OTHER; note = guanosine-3'-phosphate
  modified_base 12: mod_base = OTHER; note = uridine-3'-phosphate
  modified_base 13: mod_base = OTHER; note = guanosine-3'-phosphate
  modified_base 14: mod_base = OTHER; note = adenosine-3'-phosphate
  modified_base 15: mod_base = OTHER; note = adenosine-3'-phosphate
  modified_base 16: mod_base = OTHER; note = adenosine-3'-phosphate
  modified_base 17: mod_base = OTHER; note = adenosine-3'-phosphate
  modified_base 18: mod_base = OTHER; note = adenosine-3'-phosphate
  modified_base 19: mod_base = OTHER; note = cytidine-3'-phosphate
  misc_feature 1..19: note = RNA
  misc_feature 20..21: note = DNA
tttccaggtagtgaaaaactt

SEQ ID NO: 2642 - DNA, 21 bp, synthetic construct
  source 1..21: mol_type = other DNA
  modified_base 1: mod_base = OTHER; note = adenosine-3'-phosphate
  modified_base 2: mod_base = OTHER; note = uridine-3'-phosphate
  modified_base 3: mod_base = OTHER; note = guanosine-3'-phosphate
  modified_base 4: mod_base = OTHER; note = adenosine-3'-phosphate
  modified_base 5: mod_base = OTHER; note = uridine-3'-phosphate
  modified_base 6: mod_base = OTHER; note = uridine-3'-phosphate
  modified_base 7: mod_base = OTHER; note = uridine-3'-phosphate
  modified_base 8: mod_base = OTHER; note = cytidine-3'-phosphate
  modified_base 9: mod_base = OTHER; note = cytidine-3'-phosphate
  modified_base 10: mod_base = OTHER; note = uridine-3'-phosphate
  modified_base 11: mod_base = OTHER; note = guanosine-3'-phosphate
  modified_base 12: mod_base = OTHER; note = uridine-3'-phosphate
  modified_base 13: mod_base = OTHER; note = uridine-3'-phosphate
  modified_base 14: mod_base = OTHER; note = uridine-3'-phosphate
  modified_base 15: mod_base = OTHER; note = cytidine-3'-phosphate
  modified_base 16: mod_base = OTHER; note = cytidine-3'-phosphate
  modified_base 17: mod_base = OTHER; note = adenosine-3'-phosphate
  modified_base 18: mod_base = OTHER; note = guanosine-3'-phosphate
  modified_base 19: mod_base = OTHER; note = guanosine-3'-phosphate
  misc_feature 1..19: note = RNA
  misc_feature 20..21: note = DNA
atgatttcctgtttccaggtt

SEQ ID NO: 2643 - DNA, 21 bp, synthetic construct
  source 1..21: mol_type = other DNA
  modified_base 1: mod_base = OTHER; note = uridine-3'-phosphate
  modified_base 2: mod_base = OTHER; note = cytidine-3'-phosphate
  modified_base 3: mod_base = OTHER; note = adenosine-3'-phosphate
  modified_base 4: mod_base = OTHER; note = guanosine-3'-phosphate
  modified_base 5: mod_base = OTHER; note = adenosine-3'-phosphate
  modified_base 6: mod_base = OTHER; note = adenosine-3'-phosphate
  modified_base 7: mod_base = OTHER; note = uridine-3'-phosphate
  modified_base 8: mod_base = OTHER; note = guanosine-3'-phosphate
  modified_base 9: mod_base = OTHER; note = adenosine-3'-phosphate
  modified_base 10: mod_base = OTHER; note = adenosine-3'-phosphate
  modified_base 11: mod_base = OTHER; note = adenosine-3'-phosphate
  modified_base 12: mod_base = OTHER; note = adenosine-3'-phosphate
  modified_base 13: mod_base = OTHER; note = adenosine-3'-phosphate
  modified_base 14: mod_base = OTHER; note = uridine-3'-phosphate
  modified_base 15: mod_base = OTHER; note = guanosine-3'-phosphate
  modified_base 16: mod_base = OTHER; note = uridine-3'-phosphate
  modified_base 17: mod_base = OTHER; note = uridine-3'-phosphate
  modified_base 18: mod_base = OTHER; note = cytidine-3'-phosphate
  modified_base 19: mod_base = OTHER; note = cytidine-3'-phosphate
  misc_feature 1..19: note = RNA
  misc_feature 20..21: note = DNA
tcagaatgaaaaatgttcctt

SEQ ID NO: 2644 - DNA, 21 bp, synthetic construct
  source 1..21: mol_type = other DNA
  modified_base 1: mod_base = OTHER; note = cytidine-3'-phosphate
  modified_base 2: mod_base = OTHER; note = adenosine-3'-phosphate
  modified_base 3: mod_base = OTHER; note = adenosine-3'-phosphate
  modified_base 4: mod_base = OTHER; note = uridine-3'-phosphate
  modified_base 5: mod_base = OTHER; note = uridine-3'-phosphate
  modified_base 6: mod_base = OTHER; note = adenosine-3'-phosphate
  modified_base 7: mod_base = OTHER; note = adenosine-3'-phosphate
  modified_base 8: mod_base = OTHER; note = uridine-3'-phosphate
  modified_base 9: mod_base = OTHER; note = guanosine-3'-phosphate
  modified_base 10: mod_base = OTHER; note = guanosine-3'-phosphate
  modified_base 11: mod_base = OTHER; note = guanosine-3'-phosphate
  modified_base 12: mod_base = OTHER; note = uridine-3'-phosphate
  modified_base 13: mod_base = OTHER; note = cytidine-3'-phosphate
  modified_base 14: mod_base = OTHER; note = adenosine-3'-phosphate
  modified_base 15: mod_base = OTHER; note = guanosine-3'-phosphate
  modified_base 16: mod_base = OTHER; note = adenosine-3'-phosphate
  modified_base 17: mod_base = OTHER; note = adenosine-3'-phosphate
  modified_base 18: mod_base = OTHER; note = uridine-3'-phosphate
  modified_base 19: mod_base = OTHER; note = guanosine-3'-phosphate
  misc_feature 1..19: note = RNA
  misc_feature 20..21: note = DNA
caattaatgggtcagaatgtt

SEQ ID NO: 2645 - DNA, 21 bp, synthetic construct
  source 1..21: mol_type = other DNA
  modified_base 1: mod_base = OTHER; note = uridine-3'-phosphate
  modified_base 2: mod_base = OTHER; note = cytidine-3'-phosphate
  modified_base 3: mod_base = OTHER; note = uridine-3'-phosphate
  modified_base 4: mod_base = OTHER; note = guanosine-3'-phosphate
  modified_base 5: mod_base = OTHER; note = cytidine-3'-phosphate
  modified_base 6: mod_base = OTHER; note = uridine-3'-phosphate
  modified_base 7: mod_base = OTHER; note = uridine-3'-phosphate
  modified_base 8: mod_base = OTHER; note = uridine-3'-phosphate
  modified_base 9: mod_base = OTHER; note = uridine-3'-phosphate
  modified_base 10: mod_base = OTHER; note = cytidine-3'-phosphate
  modified_base 11: mod_base = OTHER; note = adenosine-3'-phosphate
  modified_base 12: mod_base = OTHER; note = adenosine-3'-phosphate
  modified_base 13: mod_base = OTHER; note = uridine-3'-phosphate
  modified_base 14: mod_base = OTHER; note = uridine-3'-phosphate
  modified_base 15: mod_base = OTHER; note = adenosine-3'-phosphate
  modified_base 16: mod_base = OTHER; note = adenosine-3'-phosphate
  modified_base 17: mod_base = OTHER; note = uridine-3'-phosphate
  modified_base 18: mod_base = OTHER; note = guanosine-3'-phosphate
  modified_base 19: mod_base = OTHER; note = guanosine-3'-phosphate
  misc_feature 1..19: note = RNA
  misc_feature 20..21: note = DNA
tctgcttttcaattaatggtt

SEQ ID NO: 2646 - DNA, 21 bp, synthetic construct
  source 1..21: mol_type = other DNA
  modified_base 1: mod_base = OTHER; note = uridine-3'-phosphate
  modified_base 2: mod_base = OTHER; note = uridine-3'-phosphate
  modified_base 3: mod_base = OTHER; note = uridine-3'-phosphate
  modified_base 4: mod_base = OTHER; note = cytidine-3'-phosphate
  modified_base 5: mod_base = OTHER; note = uridine-3'-phosphate
  modified_base 6: mod_base = OTHER; note = uridine-3'-phosphate
  modified_base 7: mod_base = OTHER; note = cytidine-3'-phosphate
  modified_base 8: mod_base = OTHER; note = adenosine-3'-phosphate
  modified_base 9: mod_base = OTHER; note = guanosine-3'-phosphate
  modified_base 10: mod_base = OTHER; note = uridine-3'-phosphate
  modified_base 11: mod_base = OTHER; note = uridine-3'-phosphate
  modified_base 12: mod_base = OTHER; note = uridine-3'-phosphate
  modified_base 13: mod_base = OTHER; note = cytidine-3'-phosphate
  modified_base 14: mod_base = OTHER; note = uridine-3'-phosphate
  modified_base 15: mod_base = OTHER; note = guanosine-3'-phosphate
  modified_base 16: mod_base = OTHER; note = cytidine-3'-phosphate
  modified_base 17: mod_base = OTHER; note = uridine-3'-phosphate
  modified_base 18: mod_base = OTHER; note = uridine-3'-phosphate
  modified_base 19: mod_base = OTHER; note = uridine-3'-phosphate
  misc_feature 1..19: note = RNA
  misc_feature 20..21: note = DNA
tttcttcagtttctgcttttt

SEQ ID NO: 2647 - DNA, 21 bp, synthetic construct
  source 1..21: mol_type = other DNA
  modified_base 1: mod_base = OTHER; note = uridine-3'-phosphate
  modified_base 2: mod_base = OTHER; note = uridine-3'-phosphate
  modified_base 3: mod_base = OTHER; note = uridine-3'-phosphate
  modified_base 4: mod_base = OTHER; note = adenosine-3'-phosphate
  modified_base 5: mod_base = OTHER; note = adenosine-3'-phosphate
  modified_base 6: mod_base = OTHER; note = uridine-3'-phosphate
  modified_base 7: mod_base = OTHER; note = uridine-3'-phosphate
  modified_base 8: mod_base = OTHER; note = uridine-3'-phosphate
  modified_base 9: mod_base = OTHER; note = uridine-3'-phosphate
  modified_base 10: mod_base = OTHER; note = uridine-3'-phosphate
  modified_base 11: mod_base = OTHER; note = uridine-3'-phosphate
  modified_base 12: mod_base = OTHER; note = cytidine-3'-phosphate
  modified_base 13: mod_base = OTHER; note = uridine-3'-phosphate
  modified_base 14: mod_base = OTHER; note = uridine-3'-phosphate
  modified_base 15: mod_base = OTHER; note = cytidine-3'-phosphate
  modified_base 16: mod_base = OTHER; note = adenosine-3'-phosphate
  modified_base 17: mod_base = OTHER; note = guanosine-3'-phosphate
  modified_base 18: mod_base = OTHER; note = uridine-3'-phosphate
  modified_base 19: mod_base = OTHER; note = uridine-3'-phosphate
  misc_feature 1..19: note = RNA
  misc_feature 20..21: note = DNA
tttaattttttcttcagtttt

SEQ ID NO: 2648 - DNA, 21 bp, synthetic construct
  source 1..21: mol_type = other DNA
  modified_base 1: mod_base = OTHER; note = uridine-3'-phosphate
  modified_base 2: mod_base = OTHER; note = cytidine-3'-phosphate
  modified_base 3: mod_base = OTHER; note = cytidine-3'-phosphate
  modified_base 4: mod_base = OTHER; note = cytidine-3'-phosphate
  modified_base 5: mod_base = OTHER; note = uridine-3'-phosphate
  modified_base 6: mod_base = OTHER; note = uridine-3'-phosphate
  modified_base 7: mod_base = OTHER; note = cytidine-3'-phosphate
  modified_base 8: mod_base = OTHER; note = uridine-3'-phosphate
  modified_base 9: mod_base = OTHER; note = uridine-3'-phosphate
  modified_base 10: mod_base = OTHER; note = uridine-3'-phosphate
  modified_base 11: mod_base = OTHER; note = uridine-3'-phosphate
  modified_base 12: mod_base = OTHER; note = adenosine-3'-phosphate
  modified_base 13: mod_base = OTHER; note = adenosine-3'-phosphate
  modified_base 14: mod_base = OTHER; note = uridine-3'-phosphate
  modified_base 15: mod_base = OTHER; note = uridine-3'-phosphate
  modified_base 16: mod_base = OTHER; note = uridine-3'-phosphate
  modified_base 17: mod_base = OTHER; note = uridine-3'-phosphate
  modified_base 18: mod_base = OTHER; note = uridine-3'-phosphate
  modified_base 19: mod_base = OTHER; note = uridine-3'-phosphate
  misc_feature 1..19: note = RNA
  misc_feature 20..21: note = DNA
tcccttcttttaatttttttt

SEQ ID NO: 2649 - DNA, 21 bp, synthetic construct
  source 1..21: mol_type = other DNA
  modified_base 1: mod_base = OTHER; note = cytidine-3'-phosphate
  modified_base 2: mod_base = OTHER; note = adenosine-3'-phosphate
  modified_base 3: mod_base = OTHER; note = uridine-3'-phosphate
  modified_base 4: mod_base = OTHER; note = adenosine-3'-phosphate
  modified_base 5: mod_base = OTHER; note = adenosine-3'-phosphate
  modified_base 6: mod_base = OTHER; note = uridine-3'-phosphate
  modified_base 7: mod_base = OTHER; note = guanosine-3'-phosphate
  modified_base 8: mod_base = OTHER; note = cytidine-3'-phosphate
  modified_base 9: mod_base = OTHER; note = uridine-3'-phosphate
  modified_base 10: mod_base = OTHER; note = cytidine-3'-phosphate
  modified_base 11: mod_base = OTHER; note = adenosine-3'-phosphate
  modified_base 12: mod_base = OTHER; note = adenosine-3'-phosphate
  modified_base 13: mod_base = OTHER; note = cytidine-3'-phosphate
  modified_base 14: mod_base = OTHER; note = adenosine-3'-phosphate
  modified_base 15: mod_base = OTHER; note = uridine-3'-phosphate
  modified_base 16: mod_base = OTHER; note = cytidine-3'-phosphate
  modified_base 17: mod_base = OTHER; note = cytidine-3'-phosphate
  modified_base 18: mod_base = OTHER; note = cytidine-3'-phosphate
  modified_base 19: mod_base = OTHER; note = uridine-3'-phosphate
  misc_feature 1..19: note = RNA
  misc_feature 20..21: note = DNA
cataatgctcaacatcccttt

SEQ ID NO: 2650 - DNA, 21 bp, synthetic construct
  source 1..21: mol_type = other DNA
  modified_base 1: mod_base = OTHER; note = uridine-3'-phosphate
  modified_base 2: mod_base = OTHER; note = cytidine-3'-phosphate
  modified_base 3: mod_base = OTHER; note = uridine-3'-phosphate
  modified_base 4: mod_base = OTHER; note = guanosine-3'-phosphate
  modified_base 5: mod_base = OTHER; note = uridine-3'-phosphate
  modified_base 6: mod_base = OTHER; note = adenosine-3'-phosphate
  modified_base 7: mod_base = OTHER; note = guanosine-3'-phosphate
  modified_base 8: mod_base = OTHER; note = guanosine-3'-phosphate
  modified_base 9: mod_base = OTHER; note = adenosine-3'-phosphate
  modified_base 10: mod_base = OTHER; note = cytidine-3'-phosphate
  modified_base 11: mod_base = OTHER; note = adenosine-3'-phosphate
  modified_base 12: mod_base = OTHER; note = uridine-3'-phosphate
  modified_base 13: mod_base = OTHER; note = adenosine-3'-phosphate
  modified_base 14: mod_base = OTHER; note = adenosine-3'-phosphate
  modified_base 15: mod_base = OTHER; note = uridine-3'-phosphate
  modified_base 16: mod_base = OTHER; note = guanosine-3'-phosphate
  modified_base 17: mod_base = OTHER; note = cytidine-3'-phosphate
  modified_base 18: mod_base = OTHER; note = uridine-3'-phosphate
  modified_base 19: mod_base = OTHER; note = cytidine-3'-phosphate
  misc_feature 1..19: note = RNA
  misc_feature 20..21: note = DNA
tctgtaggacataatgctctt

SEQ ID NO: 2651 - DNA, 21 bp, synthetic construct
  source 1..21: mol_type = other DNA
  modified_base 1: mod_base = OTHER; note = uridine-3'-phosphate
  modified_base 2: mod_base = OTHER; note = cytidine-3'-phosphate
  modified_base 3: mod_base = OTHER; note = adenosine-3'-phosphate
  modified_base 4: mod_base = OTHER; note = guanosine-3'-phosphate
  modified_base 5: mod_base = OTHER; note = cytidine-3'-phosphate
  modified_base 6: mod_base = OTHER; note = adenosine-3'-phosphate
  modified_base 7: mod_base = OTHER; note = uridine-3'-phosphate
  modified_base 8: mod_base = OTHER; note = uridine-3'-phosphate
  modified_base 9: mod_base = OTHER; note = uridine-3'-phosphate
  modified_base 10: mod_base = OTHER; note = cytidine-3'-phosphate
  modified_base 11: mod_base = OTHER; note = uridine-3'-phosphate
  modified_base 12: mod_base = OTHER; note = guanosine-3'-phosphate
  modified_base 13: mod_base = OTHER; note = uridine-3'-phosphate
  modified_base 14: mod_base = OTHER; note = adenosine-3'-phosphate
  modified_base 15: mod_base = OTHER; note = guanosine-3'-phosphate
  modified_base 16: mod_base = OTHER; note = guanosine-3'-phosphate
  modified_base 17: mod_base = OTHER; note = adenosine-3'-phosphate
  modified_base 18: mod_base = OTHER; note = cytidine-3'-phosphate
  modified_base 19: mod_base = OTHER; note = adenosine-3'-phosphate
  misc_feature 1..19: note = RNA
  misc_feature 20..21: note = DNA
tcagcatttctgtaggacatt

SEQ ID NO: 2652 - DNA, 21 bp, synthetic construct
  source 1..21: mol_type = other DNA
  modified_base 1: mod_base = OTHER; note = uridine-3'-phosphate
  modified_base 2: mod_base = OTHER; note = guanosine-3'-phosphate
  modified_base 3: mod_base = OTHER; note = uridine-3'-phosphate
  modified_base 4: mod_base = OTHER; note = adenosine-3'-phosphate
  modified_base 5: mod_base = OTHER; note = adenosine-3'-phosphate
  modified_base 6: mod_base = OTHER; note = guanosine-3'-phosphate
  modified_base 7: mod_base = OTHER; note = adenosine-3'-phosphate
  modified_base 8: mod_base = OTHER; note = guanosine-3'-phosphate
  modified_base 9: mod_base = OTHER; note = uridine-3'-phosphate
  modified_base 10: mod_base = OTHER; note = adenosine-3'-phosphate
  modified_base 11: mod_base = OTHER; note = guanosine-3'-phosphate
  modified_base 12: mod_base = OTHER; note = uridine-3'-phosphate
  modified_base 13: mod_base = OTHER; note = cytidine-3'-phosphate
  modified_base 14: mod_base = OTHER; note = adenosine-3'-phosphate
  modified_base 15: mod_base = OTHER; note = guanosine-3'-phosphate
  modified_base 16: mod_base = OTHER; note = cytidine-3'-phosphate
  modified_base 17: mod_base = OTHER; note = adenosine-3'-phosphate
  modified_base 18: mod_base = OTHER; note = uridine-3'-phosphate
  modified_base 19: mod_base = OTHER; note = uridine-3'-phosphate
  misc_feature 1..19: note = RNA
  misc_feature 20..21: note = DNA
tgtaagagtagtcagcatttt

SEQ ID NO: 2653 - DNA, 21 bp, synthetic construct
  source 1..21: mol_type = other DNA
  modified_base 1: mod_base = OTHER; note = uridine-3'-phosphate
  modified_base 2: mod_base = OTHER; note = cytidine-3'-phosphate
  modified_base 3: mod_base = OTHER; note = cytidine-3'-phosphate
  modified_base 4: mod_base = OTHER; note = adenosine-3'-phosphate
  modified_base 5: mod_base = OTHER; note = cytidine-3'-phosphate
  modified_base 6: mod_base = OTHER; note = adenosine-3'-phosphate
  modified_base 7: mod_base = OTHER; note = cytidine-3'-phosphate
  modified_base 8: mod_base = OTHER; note = adenosine-3'-phosphate
  modified_base 9: mod_base = OTHER; note = cytidine-3'-phosphate
  modified_base 10: mod_base = OTHER; note = uridine-3'-phosphate
  modified_base 11: mod_base = OTHER; note = guanosine-3'-phosphate
  modified_base 12: mod_base = OTHER; note = uridine-3'-phosphate
  modified_base 13: mod_base = OTHER; note = adenosine-3'-phosphate
  modified_base 14: mod_base = OTHER; note = adenosine-3'-phosphate
  modified_base 15: mod_base = OTHER; note = guanosine-3'-phosphate
  modified_base 16: mod_base = OTHER; note = adenosine-3'-phosphate
  modified_base 17: mod_base = OTHER; note = guanosine-3'-phosphate
  modified_base 18: mod_base = OTHER; note = uridine-3'-phosphate
  modified_base 19: mod_base = OTHER; note = adenosine-3'-phosphate
  misc_feature 1..19: note = RNA
  misc_feature 20..21: note = DNA
tccacacactgtaagagtatt

SEQ ID NO: 2654 - DNA, 21 bp, synthetic construct
  source 1..21: mol_type = other DNA
  modified_base 1: mod_base = OTHER; note = uridine-3'-phosphate
  modified_base 2: mod_base = OTHER; note = uridine-3'-phosphate
  modified_base 3: mod_base = OTHER; note = cytidine-3'-phosphate
  modified_base 4: mod_base = OTHER; note = cytidine-3'-phosphate
  modified_base 5: mod_base = OTHER; note = adenosine-3'-phosphate
  modified_base 6: mod_base = OTHER; note = cytidine-3'-phosphate
  modified_base 7: mod_base = OTHER; note = cytidine-3'-phosphate
  modified_base 8: mod_base = OTHER; note = cytidine-3'-phosphate
  modified_base 9: mod_base = OTHER; note = uridine-3'-phosphate
  modified_base 10: mod_base = OTHER; note = uridine-3'-phosphate
  modified_base 11: mod_base = OTHER; note = cytidine-3'-phosphate
  modified_base 12: mod_base = OTHER; note = cytidine-3'-phosphate
  modified_base 13: mod_base = OTHER; note = adenosine-3'-phosphate
  modified_base 14: mod_base = OTHER; note = cytidine-3'-phosphate
  modified_base 15: mod_base = OTHER; note = adenosine-3'-phosphate
  modified_base 16: mod_base = OTHER; note = cytidine-3'-phosphate
  modified_base 17: mod_base = OTHER; note = adenosine-3'-phosphate
  modified_base 18: mod_base = OTHER; note = cytidine-3'-phosphate
  modified_base 19: mod_base = OTHER; note = uridine-3'-phosphate
  misc_feature 1..19: note = RNA
  misc_feature 20..21: note = DNA
ttccacccttccacacacttt

SEQ ID NO: 2655 - DNA, 21 bp, synthetic construct
  source 1..21: mol_type = other DNA
  modified_base 1: mod_base = OTHER; note = adenosine-3'-phosphate
  modified_base 2: mod_base = OTHER; note = guanosine-3'-phosphate
  modified_base 3: mod_base = OTHER; note = uridine-3'-phosphate
  modified_base 4: mod_base = OTHER; note = guanosine-3'-phosphate
  modified_base 5: mod_base = OTHER; note = cytidine-3'-phosphate
  modified_base 6: mod_base = OTHER; note = uridine-3'-phosphate
  modified_base 7: mod_base = OTHER; note = adenosine-3'-phosphate
  modified_base 8: mod_base = OTHER; note = guanosine-3'-phosphate
  modified_base 9: mod_base = OTHER; note = cytidine-3'-phosphate
  modified_base 10: mod_base = OTHER; note = adenosine-3'-phosphate
  modified_base 11: mod_base = OTHER; note = cytidine-3'-phosphate
  modified_base 12: mod_base = OTHER; note = uridine-3'-phosphate
  modified_base 13: mod_base = OTHER; note = uridine-3'-phosphate
  modified_base 14: mod_base = OTHER; note = cytidine-3'-phosphate
  modified_base 15: mod_base = OTHER; note = cytidine-3'-phosphate
  modified_base 16: mod_base = OTHER; note = adenosine-3'-phosphate
  modified_base 17: mod_base = OTHER; note = cytidine-3'-phosphate
  modified_base 18: mod_base = OTHER; note = cytidine-3'-phosphate
  modified_base 19: mod_base = OTHER; note = cytidine-3'-phosphate
  misc_feature 1..19: note = RNA
  misc_feature 20..21: note = DNA
agtgctagcacttccaccctt

SEQ ID NO: 2656 - DNA, 21 bp, synthetic construct
  source 1..21: mol_type = other DNA
  modified_base 1: mod_base = OTHER; note = cytidine-3'-phosphate
  modified_base 2: mod_base = OTHER; note = uridine-3'-phosphate
  modified_base 3: mod_base = OTHER; note = guanosine-3'-phosphate
  modified_base 4: mod_base = OTHER; note = uridine-3'-phosphate
  modified_base 5: mod_base = OTHER; note = uridine-3'-phosphate
  modified_base 6: mod_base = OTHER; note = adenosine-3'-phosphate
  modified_base 7: mod_base = OTHER; note = adenosine-3'-phosphate
  modified_base 8: mod_base = OTHER; note = cytidine-3'-phosphate
  modified_base 9: mod_base = OTHER; note = cytidine-3'-phosphate
  modified_base 10: mod_base = OTHER; note = adenosine-3'-phosphate
  modified_base 11: mod_base = OTHER; note = adenosine-3'-phosphate
  modified_base 12: mod_base = OTHER; note = guanosine-3'-phosphate
  modified_base 13: mod_base = OTHER; note = uridine-3'-phosphate
  modified_base 14: mod_base = OTHER; note = guanosine-3'-phosphate
  modified_base 15: mod_base = OTHER; note = cytidine-3'-phosphate
  modified_base 16: mod_base = OTHER; note = uridine-3'-phosphate
  modified_base 17: mod_base = OTHER; note = adenosine-3'-phosphate
  modified_base 18: mod_base = OTHER; note = guanosine-3'-phosphate
  modified_base 19: mod_base = OTHER; note = cytidine-3'-phosphate
  misc_feature 1..19: note = RNA
  misc_feature 20..21: note = DNA
ctgttaaccaagtgctagctt

SEQ ID NO: 2657 - DNA, 21 bp, synthetic construct
  source 1..21: mol_type = other DNA
  modified_base 1: mod_base = OTHER; note = adenosine-3'-phosphate
  modified_base 2: mod_base = OTHER; note = adenosine-3'-phosphate
  modified_base 3: mod_base = OTHER; note = adenosine-3'-phosphate
  modified_base 4: mod_base = OTHER; note = guanosine-3'-phosphate
  modified_base 5: mod_base = OTHER; note = cytidine-3'-phosphate
  modified_base 6: mod_base = OTHER; note = adenosine-3'-phosphate
  modified_base 7: mod_base = OTHER; note = adenosine-3'-phosphate
  modified_base 8: mod_base = OTHER; note = adenosine-3'-phosphate
  modified_base 9: mod_base = OTHER; note = adenosine-3'-phosphate
  modified_base 10: mod_base = OTHER; note = guanosine-3'-phosphate
  modified_base 11: mod_base = OTHER; note = cytidine-3'-phosphate
  modified_base 12: mod_base = OTHER; note = uridine-3'-phosphate
  modified_base 13: mod_base = OTHER; note = guanosine-3'-phosphate
  modified_base 14: mod_base = OTHER; note = uridine-3'-phosphate
  modified_base 15: mod_base = OTHER; note = uridine-3'-phosphate
  modified_base 16: mod_base = OTHER; note = adenosine-3'-phosphate
  modified_base 17: mod_base = OTHER; note = adenosine-3'-phosphate
  modified_base 18: mod_base = OTHER; note = cytidine-3'-phosphate
  modified_base 19: mod_base = OTHER; note = cytidine-3'-phosphate
  misc_feature 1..19: note = RNA
  misc_feature 20..21: note = DNA
aaagcaaaagctgttaacctt

SEQ ID NO: 2658 - DNA, 21 bp, synthetic construct
  source 1..21: mol_type = other DNA
  modified_base 1: mod_base = OTHER; note = uridine-3'-phosphate
  modified_base 2: mod_base = OTHER; note = cytidine-3'-phosphate
  modified_base 3: mod_base = OTHER; note = cytidine-3'-phosphate
  modified_base 4: mod_base = OTHER; note = adenosine-3'-phosphate
  modified_base 5: mod_base = OTHER; note = adenosine-3'-phosphate
  modified_base 6: mod_base = OTHER; note = guanosine-3'-phosphate
  modified_base 7: mod_base = OTHER; note = uridine-3'-phosphate
  modified_base 8: mod_base = OTHER; note = adenosine-3'-phosphate
  modified_base 9: mod_base = OTHER; note = cytidine-3'-phosphate
  modified_base 10: mod_base = OTHER; note = uridine-3'-phosphate
  modified_base 11: mod_base = OTHER; note = cytidine-3'-phosphate
  modified_base 12: mod_base = OTHER; note = uridine-3'-phosphate
  modified_base 13: mod_base = OTHER; note = uridine-3'-phosphate
  modified_base 14: mod_base = OTHER; note = adenosine-3'-phosphate
  modified_base 15: mod_base = OTHER; note = adenosine-3'-phosphate
  modified_base 16: mod_base = OTHER; note = adenosine-3'-phosphate
  modified_base 17: mod_base = OTHER; note = guanosine-3'-phosphate
  modified_base 18: mod_base = OTHER; note = cytidine-3'-phosphate
  modified_base 19: mod_base = OTHER; note = adenosine-3'-phosphate
  misc_feature 1..19: note = RNA
  misc_feature 20..21: note = DNA
tccaagtactcttaaagcatt

SEQ ID NO: 2659 - DNA, 21 bp, synthetic construct
  source 1..21: mol_type = other DNA
  modified_base 1: mod_base = OTHER; note = uridine-3'-phosphate
  modified_base 2: mod_base = OTHER; note = adenosine-3'-phosphate
  modified_base 3: mod_base = OTHER; note = uridine-3'-phosphate
  modified_base 4: mod_base = OTHER; note = uridine-3'-phosphate
  modified_base 5: mod_base = OTHER; note = uridine-3'-phosphate
  modified_base 6: mod_base = OTHER; note = adenosine-3'-phosphate
  modified_base 7: mod_base = OTHER; note = cytidine-3'-phosphate
  modified_base 8: mod_base = OTHER; note = uridine-3'-phosphate
  modified_base 9: mod_base = OTHER; note = uridine-3'-phosphate
  modified_base 10: mod_base = OTHER; note = guanosine-3'-phosphate
  modified_base 11: mod_base = OTHER; note = uridine-3'-phosphate
  modified_base 12: mod_base = OTHER; note = cytidine-3'-phosphate
  modified_base 13: mod_base = OTHER; note = cytidine-3'-phosphate
  modified_base 14: mod_base = OTHER; note = adenosine-3'-phosphate
  modified_base 15: mod_base = OTHER; note = adenosine-3'-phosphate
  modified_base 16: mod_base = OTHER; note = guanosine-3'-phosphate
  modified_base 17: mod_base = OTHER; note = uridine-3'-phosphate
  modified_base 18: mod_base = OTHER; note = adenosine-3'-phosphate
  modified_base 19: mod_base = OTHER; note = cytidine-3'-phosphate
  misc_feature 1..19: note = RNA
  misc_feature 20..21: note = DNA
tatttacttgtccaagtactt

SEQ ID NO: 2660 - DNA, 21 bp, synthetic construct
  source 1..21: mol_type = other DNA
  modified_base 1: mod_base = OTHER; note = cytidine-3'-phosphate
  modified_base 2: mod_base = OTHER; note = uridine-3'-phosphate
  modified_base 3: mod_base = OTHER; note = adenosine-3'-phosphate
  modified_base 4: mod_base = OTHER; note = cytidine-3'-phosphate
  modified_base 5: mod_base = OTHER; note = guanosine-3'-phosphate
  modified_base 6: mod_base = OTHER; note = uridine-3'-phosphate
  modified_base 7: mod_base = OTHER; note = adenosine-3'-phosphate
  modified_base 8: mod_base = OTHER; note = uridine-3'-phosphate
  modified_base 9: mod_base = OTHER; note = uridine-3'-phosphate
  modified_base 10: mod_base = OTHER; note = uridine-3'-phosphate
  modified_base 11: mod_base = OTHER; note = adenosine-3'-phosphate
  modified_base 12: mod_base = OTHER; note = uridine-3'-phosphate
  modified_base 13: mod_base = OTHER; note = uridine-3'-phosphate
  modified_base 14: mod_base = OTHER; note = uridine-3'-phosphate
  modified_base 15: mod_base = OTHER; note = adenosine-3'-phosphate
  modified_base 16: mod_base = OTHER; note = cytidine-3'-phosphate
  modified_base 17: mod_base = OTHER; note = uridine-3'-phosphate
  modified_base 18: mod_base = OTHER; note = uridine-3'-phosphate
  modified_base 19: mod_base = OTHER; note = guanosine-3'-phosphate
  misc_feature 1..19: note = RNA
  misc_feature 20..21: note = DNA
ctacgtatttatttacttgtt

SEQ ID NO: 2661 - DNA, 21 bp, synthetic construct
  source 1..21: mol_type = other DNA
  modified_base 1: mod_base = OTHER; note = uridine-3'-phosphate
  modified_base 2: mod_base = OTHER; note = uridine-3'-phosphate
  modified_base 3: mod_base = OTHER; note = cytidine-3'-phosphate
  modified_base 4: mod_base = OTHER; note = uridine-3'-phosphate
  modified_base 5: mod_base = OTHER; note = guanosine-3'-phosphate
  modified_base 6: mod_base = OTHER; note = cytidine-3'-phosphate
  modified_base 7: mod_base = OTHER; note = uridine-3'-phosphate
  modified_base 8: mod_base = OTHER; note = cytidine-3'-phosphate
  modified_base 9: mod_base = OTHER; note = uridine-3'-phosphate
  modified_base 10: mod_base = OTHER; note = adenosine-3'-phosphate
  modified_base 11: mod_base = OTHER; note = cytidine-3'-phosphate
  modified_base 12: mod_base = OTHER; note = guanosine-3'-phosphate
  modified_base 13: mod_base = OTHER; note = uridine-3'-phosphate
  modified_base 14: mod_base = OTHER; note = adenosine-3'-phosphate
  modified_base 15: mod_base = OTHER; note = uridine-3'-phosphate
  modified_base 16: mod_base = OTHER; note = uridine-3'-phosphate
  modified_base 17: mod_base = OTHER; note = uridine-3'-phosphate
  modified_base 18: mod_base = OTHER; note = adenosine-3'-phosphate
  modified_base 19: mod_base = OTHER; note = uridine-3'-phosphate
  misc_feature 1..19: note = RNA
  misc_feature 20..21: note = DNA
ttctgctctacgtatttattt

SEQ ID NO: 2662 - DNA, 21 bp, synthetic construct
  source 1..21: mol_type = other DNA
  modified_base 1: mod_base = OTHER; note = uridine-3'-phosphate
  modified_base 2: mod_base = OTHER; note = uridine-3'-phosphate
  modified_base 3: mod_base = OTHER; note = guanosine-3'-phosphate
  modified_base 4: mod_base = OTHER; note = adenosine-3'-phosphate
  modified_base 5: mod_base = OTHER; note = adenosine-3'-phosphate
  modified_base 6: mod_base = OTHER; note = uridine-3'-phosphate
  modified_base 7: mod_base = OTHER; note = uridine-3'-phosphate
  modified_base 8: mod_base = OTHER; note = uridine-3'-phosphate
  modified_base 9: mod_base = OTHER; note = uridine-3'-phosphate
  modified_base 10: mod_base = OTHER; note = guanosine-3'-phosphate
  modified_base 11: mod_base = OTHER; note = guanosine-3'-phosphate
  modified_base 12: mod_base = OTHER; note = uridine-3'-phosphate
  modified_base 13: mod_base = OTHER; note = uridine-3'-phosphate
  modified_base 14: mod_base = OTHER; note = cytidine-3'-phosphate
  modified_base 15: mod_base = OTHER; note = uridine-3'-phosphate
  modified_base 16: mod_base = OTHER; note = guanosine-3'-phosphate
  modified_base 17: mod_base = OTHER; note = cytidine-3'-phosphate
  modified_base 18: mod_base = OTHER; note = uridine-3'-phosphate
  modified_base 19: mod_base = OTHER; note = cytidine-3'-phosphate
  misc_feature 1..19: note = RNA
  misc_feature 20..21: note = DNA
ttgaattttggttctgctctt

SEQ ID NO: 2663 - DNA, 21 bp, synthetic construct
  source 1..21: mol_type = other DNA
  modified_base 1: mod_base = OTHER; note = adenosine-3'-phosphate
  modified_base 2: mod_base = OTHER; note = adenosine-3'-phosphate
  modified_base 3: mod_base = OTHER; note = guanosine-3'-phosphate
  modified_base 4: mod_base = OTHER; note = adenosine-3'-phosphate
  modified_base 5: mod_base = OTHER; note = adenosine-3'-phosphate
  modified_base 6: mod_base = OTHER; note = uridine-3'-phosphate
  modified_base 7: mod_base = OTHER; note = uridine-3'-phosphate
  modified_base 8: mod_base = OTHER; note = adenosine-3'-phosphate
  modified_base 9: mod_base = OTHER; note = cytidine-3'-phosphate
  modified_base 10: mod_base = OTHER; note = adenosine-3'-phosphate
  modified_base 11: mod_base = OTHER; note = adenosine-3'-phosphate
  modified_base 12: mod_base = OTHER; note = adenosine-3'-phosphate
  modified_base 13: mod_base = OTHER; note = uridine-3'-phosphate
  modified_base 14: mod_base = OTHER; note = uridine-3'-phosphate
  modified_base 15: mod_base = OTHER; note = guanosine-3'-phosphate
  modified_base 16: mod_base = OTHER; note = adenosine-3'-phosphate
  modified_base 17: mod_base = OTHER; note = adenosine-3'-phosphate
  modified_base 18: mod_base = OTHER; note = uridine-3'-phosphate
  modified_base 19: mod_base = OTHER; note = uridine-3'-phosphate
  misc_feature 1..19: note = RNA
  misc_feature 20..21: note = DNA
aagaattacaaattgaatttt

SEQ ID NO: 2664 - DNA, 21 bp, synthetic construct
  source 1..21: mol_type = other DNA
  modified_base 1: mod_base = OTHER; note = adenosine-3'-phosphate
  modified_base 2: mod_base = OTHER; note = guanosine-3'-phosphate
  modified_base 3: mod_base = OTHER; note = cytidine-3'-phosphate
  modified_base 4: mod_base = OTHER; note = cytidine-3'-phosphate
  modified_base 5: mod_base = OTHER; note = adenosine-3'-phosphate
  modified_base 6: mod_base = OTHER; note = cytidine-3'-phosphate
  modified_base 7: mod_base = OTHER; note = adenosine-3'-phosphate
  modified_base 8: mod_base = OTHER; note = adenosine-3'-phosphate
  modified_base 9: mod_base = OTHER; note = uridine-3'-phosphate
  modified_base 10: mod_base = OTHER; note = adenosine-3'-phosphate
  modified_base 11: mod_base = OTHER; note = adenosine-3'-phosphate
  modified_base 12: mod_base = OTHER; note = adenosine-3'-phosphate
  modified_base 13: mod_base = OTHER; note = guanosine-3'-phosphate
  modified_base 14: mod_base = OTHER; note = adenosine-3'-phosphate
  modified_base 15: mod_base = OTHER; note = adenosine-3'-phosphate
  modified_base 16: mod_base = OTHER; note = uridine-3'-phosphate
  modified_base 17: mod_base = OTHER; note = uridine-3'-phosphate
  modified_base 18: mod_base = OTHER; note = adenosine-3'-phosphate
  modified_base 19: mod_base = OTHER; note = cytidine-3'-phosphate
  misc_feature 1..19: note = RNA
  misc_feature 20..21: note = DNA
agccacaataaagaattactt

SEQ ID NO: 2665 - DNA, 21 bp, synthetic construct
  source 1..21: mol_type = other DNA
  modified_base 1: mod_base = OTHER; note = adenosine-3'-phosphate
  modified_base 2: mod_base = OTHER; note = uridine-3'-phosphate
  modified_base 3: mod_base = OTHER; note = uridine-3'-phosphate
  modified_base 4: mod_base = OTHER; note = cytidine-3'-phosphate
  modified_base 5: mod_base = OTHER; note = uridine-3'-phosphate
  modified_base 6: mod_base = OTHER; note = cytidine-3'-phosphate
  modified_base 7: mod_base = OTHER; note = adenosine-3'-phosphate
  modified_base 8: mod_base = OTHER; note = adenosine-3'-phosphate
  modified_base 9: mod_base = OTHER; note = cytidine-3'-phosphate
  modified_base 10: mod_base = OTHER; note = uridine-3'-phosphate
  modified_base 11: mod_base = OTHER; note = adenosine-3'-phosphate
  modified_base 12: mod_base = OTHER; note = guanosine-3'-phosphate
  modified_base 13: mod_base = OTHER; note = cytidine-3'-phosphate
  modified_base 14: mod_base = OTHER; note = cytidine-3'-phosphate
  modified_base 15: mod_base = OTHER; note = adenosine-3'-phosphate
  modified_base 16: mod_base = OTHER; note = cytidine-3'-phosphate
  modified_base 17: mod_base = OTHER; note = adenosine-3'-phosphate
  modified_base 18: mod_base = OTHER; note = adenosine-3'-phosphate
  modified_base 19: mod_base = OTHER; note = uridine-3'-phosphate
  misc_feature 1..19: note = RNA
  misc_feature 20..21: note = DNA
attctcaactagccacaattt

SEQ ID NO: 2666 - DNA, 21 bp, synthetic construct
  source 1..21: mol_type = other DNA
  modified_base 1: mod_base = OTHER; note = adenosine-3'-phosphate
  modified_base 2: mod_base = OTHER; note = uridine-3'-phosphate
  modified_base 3: mod_base = OTHER; note = uridine-3'-phosphate
  modified_base 4: mod_base = OTHER; note = guanosine-3'-phosphate
  modified_base 5: mod_base = OTHER; note = adenosine-3'-phosphate
  modified_base 6: mod_base = OTHER; note = uridine-3'-phosphate
  modified_base 7: mod_base = OTHER; note = adenosine-3'-phosphate
  modified_base 8: mod_base = OTHER; note = adenosine-3'-phosphate
  modified_base 9: mod_base = OTHER; note = uridine-3'-phosphate
  modified_base 10: mod_base = OTHER; note = uridine-3'-phosphate
  modified_base 11: mod_base = OTHER; note = cytidine-3'-phosphate
  modified_base 12: mod_base = OTHER; note = uridine-3'-phosphate
  modified_base 13: mod_base = OTHER; note = cytidine-3'-phosphate
  modified_base 14: mod_base = OTHER; note = adenosine-3'-phosphate
  modified_base 15: mod_base = OTHER; note = adenosine-3'-phosphate
  modified_base 16: mod_base = OTHER; note = cytidine-3'-phosphate
  modified_base 17: mod_base = OTHER; note = uridine-3'-phosphate
  modified_base 18: mod_base = OTHER; note = adenosine-3'-phosphate
  modified_base 19: mod_base = OTHER; note = guanosine-3'-phosphate
  misc_feature 1..19: note = RNA
  misc_feature 20..21: note = DNA
attgataattctcaactagtt

SEQ ID NO: 2667 - DNA, 21 bp, synthetic construct
  source 1..21: mol_type = other DNA
  modified_base 1: mod_base = OTHER; note = uridine-3'-phosphate
  modified_base 2: mod_base = OTHER; note = cytidine-3'-phosphate
  modified_base 3: mod_base = OTHER; note = cytidine-3'-phosphate
  modified_base 4: mod_base = OTHER; note = adenosine-3'-phosphate
  modified_base 5: mod_base = OTHER; note = uridine-3'-phosphate
  modified_base 6: mod_base = OTHER; note = uridine-3'-phosphate
  modified_base 7: mod_base = OTHER; note = adenosine-3'-phosphate
  modified_base 8: mod_base = OTHER; note = uridine-3'-phosphate
  modified_base 9: mod_base = OTHER; note = cytidine-3'-phosphate
  modified_base 10: mod_base = OTHER; note = uridine-3'-phosphate
  modified_base 11: mod_base = OTHER; note = adenosine-3'-phosphate
  modified_base 12: mod_base = OTHER; note = adenosine-3'-phosphate
  modified_base 13: mod_base = OTHER; note = uridine-3'-phosphate
  modified_base 14: mod_base = OTHER; note = uridine-3'-phosphate
  modified_base 15: mod_base = OTHER; note = guanosine-3'-phosphate
  modified_base 16: mod_base = OTHER; note = adenosine-3'-phosphate
  modified_base 17: mod_base = OTHER; note = uridine-3'-phosphate
  modified_base 18: mod_base = OTHER; note = adenosine-3'-phosphate
  modified_base 19: mod_base = OTHER; note = adenosine-3'-phosphate
  misc_feature 1..19: note = RNA
  misc_feature 20..21: note = DNA
tccattatctaattgataatt

SEQ ID NO: 2668 - DNA, 21 bp, synthetic construct
  source 1..21: mol_type = other DNA
  modified_base 1: mod_base = OTHER; note = uridine-3'-phosphate
  modified_base 2: mod_base = OTHER; note = uridine-3'-phosphate
  modified_base 3: mod_base = OTHER; note = uridine-3'-phosphate
  modified_base 4: mod_base = OTHER; note = cytidine-3'-phosphate
  modified_base 5: mod_base = OTHER; note = cytidine-3'-phosphate
  modified_base 6: mod_base = OTHER; note = uridine-3'-phosphate
  modified_base 7: mod_base = OTHER; note = uridine-3'-phosphate
  modified_base 8: mod_base = OTHER; note = guanosine-3'-phosphate
  modified_base 9: mod_base = OTHER; note = adenosine-3'-phosphate
  modified_base 10: mod_base = OTHER; note = adenosine-3'-phosphate
  modified_base 11: mod_base = OTHER; note = adenosine-3'-phosphate
  modified_base 12: mod_base = OTHER; note = guanosine-3'-phosphate
  modified_base 13: mod_base = OTHER; note = adenosine-3'-phosphate
  modified_base 14: mod_base = OTHER; note = uridine-3'-phosphate
  modified_base 15: mod_base = OTHER; note = cytidine-3'-phosphate
  modified_base 16: mod_base = OTHER; note = cytidine-3'-phosphate
  modified_base 17: mod_base = OTHER; note = adenosine-3'-phosphate
  modified_base 18: mod_base = OTHER; note = uridine-3'-phosphate
  modified_base 19: mod_base = OTHER; note = uridine-3'-phosphate
  misc_feature 1..19: note = RNA
  misc_feature 20..21: note = DNA
tttccttgaaagatccatttt

SEQ ID NO: 2669 - DNA, 21 bp, synthetic construct
  source 1..21: mol_type = other DNA
  modified_base 1: mod_base = OTHER; note = uridine-3'-phosphate
  modified_base 2: mod_base = OTHER; note = guanosine-3'-phosphate
  modified_base 3: mod_base = OTHER; note = uridine-3'-phosphate
  modified_base 4: mod_base = OTHER; note = guanosine-3'-phosphate
  modified_base 5: mod_base = OTHER; note = adenosine-3'-phosphate
  modified_base 6: mod_base = OTHER; note = adenosine-3'-phosphate
  modified_base 7: mod_base = OTHER; note = uridine-3'-phosphate
  modified_base 8: mod_base = OTHER; note = uridine-3'-phosphate
  modified_base 9: mod_base = OTHER; note = uridine-3'-phosphate
  modified_base 10: mod_base = OTHER; note = uridine-3'-phosphate
  modified_base 11: mod_base = OTHER; note = cytidine-3'-phosphate
  modified_base 12: mod_base = OTHER; note = cytidine-3'-phosphate
  modified_base 13: mod_base = OTHER; note = uridine-3'-phosphate
  modified_base 14: mod_base = OTHER; note = uridine-3'-phosphate
  modified_base 15: mod_base = OTHER; note = guanosine-3'-phosphate
  modified_base 16: mod_base = OTHER; note = adenosine-3'-phosphate
  modified_base 17: mod_base = OTHER; note = adenosine-3'-phosphate
  modified_base 18: mod_base = OTHER; note = adenosine-3'-phosphate
  modified_base 19: mod_base = OTHER; note = guanosine-3'-phosphate
  misc_feature 1..19: note = RNA
  misc_feature 20..21: note = DNA
tgtgaattttccttgaaagtt

SEQ ID NO: 2670 - DNA, 21 bp, synthetic construct
  source 1..21: mol_type = other DNA
  modified_base 1: mod_base = OTHER; note = uridine-3'-phosphate
  modified_base 2: mod_base = OTHER; note = uridine-3'-phosphate
  modified_base 3: mod_base = OTHER; note = guanosine-3'-phosphate
  modified_base 4: mod_base = OTHER; note = guanosine-3'-phosphate
  modified_base 5: mod_base = OTHER; note = uridine-3'-phosphate
  modified_base 6: mod_base = OTHER; note = uridine-3'-phosphate
  modified_base 7: mod_base = OTHER; note = guanosine-3'-phosphate
  modified_base 8: mod_base = OTHER; note = adenosine-3'-phosphate
  modified_base 9: mod_base = OTHER; note = uridine-3'-phosphate
  modified_base 10: mod_base = OTHER; note = adenosine-3'-phosphate
  modified_base 11: mod_base = OTHER; note = cytidine-3'-phosphate
  modified_base 12: mod_base = OTHER; note = uridine-3'-phosphate
  modified_base 13: mod_base = OTHER; note = guanosine-3'-phosphate
  modified_base 14: mod_base = OTHER; note = uridine-3'-phosphate
  modified_base 15: mod_base = OTHER; note = guanosine-3'-phosphate
  modified_base 16: mod_base = OTHER; note = adenosine-3'-phosphate
  modified_base 17: mod_base = OTHER; note = adenosine-3'-phosphate
  modified_base 18: mod_base = OTHER; note = uridine-3'-phosphate
  modified_base 19: mod_base = OTHER; note = uridine-3'-phosphate
  misc_feature 1..19: note = RNA
  misc_feature 20..21: note = DNA
ttggttgatactgtgaatttt

SEQ ID NO: 2671 - DNA, 21 bp, synthetic construct
  source 1..21: mol_type = other DNA
  modified_base 1: mod_base = OTHER; note = uridine-3'-phosphate
  modified_base 2: mod_base = OTHER; note = adenosine-3'-phosphate
  modified_base 3: mod_base = OTHER; note = adenosine-3'-phosphate
  modified_base 4: mod_base = OTHER; note = uridine-3'-phosphate
  modified_base 5: mod_base = OTHER; note = uridine-3'-phosphate
  modified_base 6: mod_base = OTHER; note = uridine-3'-phosphate
  modified_base 7: mod_base = OTHER; note = uridine-3'-phosphate
  modified_base 8: mod_base = OTHER; note = adenosine-3'-phosphate
  modified_base 9: mod_base = OTHER; note = uridine-3'-phosphate
  modified_base 10: mod_base = OTHER; note = uridine-3'-phosphate
  modified_base 11: mod_base = OTHER; note = guanosine-3'-phosphate
  modified_base 12: mod_base = OTHER; note = guanosine-3'-phosphate
  modified_base 13: mod_base = OTHER; note = uridine-3'-phosphate
  modified_base 14: mod_base = OTHER; note = uridine-3'-phosphate
  modified_base 15: mod_base = OTHER; note = guanosine-3'-phosphate
  modified_base 16: mod_base = OTHER; note = adenosine-3'-phosphate
  modified_base 17: mod_base = OTHER; note = uridine-3'-phosphate
  modified_base 18: mod_base = OTHER; note = adenosine-3'-phosphate
  modified_base 19: mod_base = OTHER; note = cytidine-3'-phosphate
  misc_feature 1..19: note = RNA
  misc_feature 20..21: note = DNA
taattttattggttgatactt

SEQ ID NO: 2672 - DNA, 21 bp, synthetic construct
  source 1..21: mol_type = other DNA
  modified_base 1: mod_base = OTHER; note = cytidine-3'-phosphate
  modified_base 2: mod_base = OTHER; note = adenosine-3'-phosphate
  modified_base 3: mod_base = OTHER; note = adenosine-3'-phosphate
  modified_base 4: mod_base = OTHER; note = guanosine-3'-phosphate
  modified_base 5: mod_base = OTHER; note = guanosine-3'-phosphate
  modified_base 6: mod_base = OTHER; note = uridine-3'-phosphate
  modified_base 7: mod_base = OTHER; note = adenosine-3'-phosphate
  modified_base 8: mod_base = OTHER; note = cytidine-3'-phosphate
  modified_base 9: mod_base = OTHER; note = cytidine-3'-phosphate
  modified_base 10: mod_base = OTHER; note = cytidine-3'-phosphate
  modified_base 11: mod_base = OTHER; note = uridine-3'-phosphate
  modified_base 12: mod_base = OTHER; note = guanosine-3'-phosphate
  modified_base 13: mod_base = OTHER; note = uridine-3'-phosphate
  modified_base 14: mod_base = OTHER; note = adenosine-3'-phosphate
  modified_base 15: mod_base = OTHER; note = adenosine-3'-phosphate
  modified_base 16: mod_base = OTHER; note = uridine-3'-phosphate
  modified_base 17: mod_base = OTHER; note = uridine-3'-phosphate
  modified_base 18: mod_base = OTHER; note = uridine-3'-phosphate
  modified_base 19: mod_base = OTHER; note = uridine-3'-phosphate
  misc_feature 1..19: note = RNA
  misc_feature 20..21: note = DNA
caaggtaccctgtaatttttt

SEQ ID NO: 2673 - DNA, 21 bp, synthetic construct
  source 1..21: mol_type = other DNA
  modified_base 1: mod_base = OTHER; note = uridine-3'-phosphate
  modified_base 2: mod_base = OTHER; note = cytidine-3'-phosphate
  modified_base 3: mod_base = OTHER; note = adenosine-3'-phosphate
  modified_base 4: mod_base = OTHER; note = adenosine-3'-phosphate
  modified_base 5: mod_base = OTHER; note = cytidine-3'-phosphate
  modified_base 6: mod_base = OTHER; note = adenosine-3'-phosphate
  modified_base 7: mod_base = OTHER; note = guanosine-3'-phosphate
  modified_base 8: mod_base = OTHER; note = guanosine-3'-phosphate
  modified_base 9: mod_base = OTHER; note = cytidine-3'-phosphate
  modified_base 10: mod_base = OTHER; note = adenosine-3'-phosphate
  modified_base 11: mod_base = OTHER; note = adenosine-3'-phosphate
  modified_base 12: mod_base = OTHER; note = guanosine-3'-phosphate
  modified_base 13: mod_base = OTHER; note = guanosine-3'-phosphate
  modified_base 14: mod_base = OTHER; note = uridine-3'-phosphate
  modified_base 15: mod_base = OTHER; note = adenosine-3'-phosphate
  modified_base 16: mod_base = OTHER; note = cytidine-3'-phosphate
  modified_base 17: mod_base = OTHER; note = cytidine-3'-phosphate
  modified_base 18: mod_base = OTHER; note = cytidine-3'-phosphate
  modified_base 19: mod_base = OTHER; note = uridine-3'-phosphate
  misc_feature 1..19: note = RNA
  misc_feature 20..21: note = DNA
tcaacaggcaaggtacccttt

SEQ ID NO: 2674 - DNA, 21 bp, synthetic construct
  source 1..21: mol_type = other DNA
  modified_base 1: mod_base = OTHER; note = uridine-3'-phosphate
  modified_base 2: mod_base = OTHER; note = guanosine-3'-phosphate
  modified_base 3: mod_base = OTHER; note = uridine-3'-phosphate
  modified_base 4: mod_base = OTHER; note = uridine-3'-phosphate
  modified_base 5: mod_base = OTHER; note = cytidine-3'-phosphate
  modified_base 6: mod_base = OTHER; note = uridine-3'-phosphate
  modified_base 7: mod_base = OTHER; note = cytidine-3'-phosphate
  modified_base 8: mod_base = OTHER; note = uridine-3'-phosphate
  modified_base 9: mod_base = OTHER; note = cytidine-3'-phosphate
  modified_base 10: mod_base = OTHER; note = guanosine-3'-phosphate
  modified_base 11: mod_base = OTHER; note = guanosine-3'-phosphate
  modified_base 12: mod_base = OTHER; note = guanosine-3'-phosphate
  modified_base 13: mod_base = OTHER; note = cytidine-3'-phosphate
  modified_base 14: mod_base = OTHER; note = uridine-3'-phosphate
  modified_base 15: mod_base = OTHER; note = uridine-3'-phosphate
  modified_base 16: mod_base = OTHER; note = cytidine-3'-phosphate
  modified_base 17: mod_base = OTHER; note = adenosine-3'-phosphate
  modified_base 18: mod_base = OTHER; note = adenosine-3'-phosphate
  modified_base 19: mod_base = OTHER; note = cytidine-3'-phosphate
  misc_feature 1..19: note = RNA
  misc_feature 20..21: note = DNA
tgttctctcgggcttcaactt

SEQ ID NO: 2675 - DNA, 21 bp, synthetic construct
  source 1..21: mol_type = other DNA
  modified_base 1: mod_base = OTHER; note = adenosine-3'-phosphate
  modified_base 2: mod_base = OTHER; note = uridine-3'-phosphate
  modified_base 3: mod_base = OTHER; note = adenosine-3'-phosphate
  modified_base 4: mod_base = OTHER; note = uridine-3'-phosphate
  modified_base 5: mod_base = OTHER; note = adenosine-3'-phosphate
  modified_base 6: mod_base = OTHER; note = adenosine-3'-phosphate
  modified_base 7: mod_base = OTHER; note = guanosine-3'-phosphate
  modified_base 8: mod_base = OTHER; note = cytidine-3'-phosphate
  modified_base 9: mod_base = OTHER; note = uridine-3'-phosphate
  modified_base 10: mod_base = OTHER; note = guanosine-3'-phosphate
  modified_base 11: mod_base = OTHER; note = uridine-3'-phosphate
  modified_base 12: mod_base = OTHER; note = uridine-3'-phosphate
  modified_base 13: mod_base = OTHER; note = cytidine-3'-phosphate
  modified_base 14: mod_base = OTHER; note = uridine-3'-phosphate
  modified_base 15: mod_base = OTHER; note = cytidine-3'-phosphate
  modified_base 16: mod_base = OTHER; note = uridine-3'-phosphate
  modified_base 17: mod_base = OTHER; note = cytidine-3'-phosphate
  modified_base 18: mod_base = OTHER; note = guanosine-3'-phosphate
  modified_base 19: mod_base = OTHER; note = guanosine-3'-phosphate
  misc_feature 1..19: note = RNA
  misc_feature 20..21: note = DNA
atataagctgttctctcggtt

SEQ ID NO: 2676 - DNA, 21 bp, synthetic construct
  source 1..21: mol_type = other DNA
  modified_base 1: mod_base = OTHER; note = adenosine-3'-phosphate
  modified_base 2: mod_base = OTHER; note = adenosine-3'-phosphate
  modified_base 3: mod_base = OTHER; note = guanosine-3'-phosphate
  modified_base 4: mod_base = OTHER; note = guanosine-3'-phosphate
  modified_base 5: mod_base = OTHER; note = cytidine-3'-phosphate
  modified_base 6: mod_base = OTHER; note = uridine-3'-phosphate
  modified_base 7: mod_base = OTHER; note = guanosine-3'-phosphate
  modified_base 8: mod_base = OTHER; note = uridine-3'-phosphate
  modified_base 9: mod_base = OTHER; note = adenosine-3'-phosphate
  modified_base 10: mod_base = OTHER; note = adenosine-3'-phosphate
  modified_base 11: mod_base = OTHER; note = guanosine-3'-phosphate
  modified_base 12: mod_base = OTHER; note = adenosine-3'-phosphate
  modified_base 13: mod_base = OTHER; note = uridine-3'-phosphate
  modified_base 14: mod_base = OTHER; note = adenosine-3'-phosphate
  modified_base 15: mod_base = OTHER; note = uridine-3'-phosphate
  modified_base 16: mod_base = OTHER; note = adenosine-3'-phosphate
  modified_base 17: mod_base = OTHER; note = adenosine-3'-phosphate
  modified_base 18: mod_base = OTHER; note = guanosine-3'-phosphate
  modified_base 19: mod_base = OTHER; note = cytidine-3'-phosphate
  misc_feature 1..19: note = RNA
  misc_feature 20..21: note = DNA
aaggctgtaagatataagctt

SEQ ID NO: 2677 - DNA, 21 bp, synthetic construct
  source 1..21: mol_type = other DNA
  modified_base 1: mod_base = OTHER; note = uridine-3'-phosphate
  modified_base 2: mod_base = OTHER; note = cytidine-3'-phosphate
  modified_base 3: mod_base = OTHER; note = adenosine-3'-phosphate
  modified_base 4: mod_base = OTHER; note = cytidine-3'-phosphate
  modified_base 5: mod_base = OTHER; note = adenosine-3'-phosphate
  modified_base 6: mod_base = OTHER; note = guanosine-3'-phosphate
  modified_base 7: mod_base = OTHER; note = uridine-3'-phosphate
  modified_base 8: mod_base = OTHER; note = adenosine-3'-phosphate
  modified_base 9: mod_base = OTHER; note = adenosine-3'-phosphate
  modified_base 10: mod_base = OTHER; note = adenosine-3'-phosphate
  modified_base 11: mod_base = OTHER; note = guanosine-3'-phosphate
  modified_base 12: mod_base = OTHER; note = guanosine-3'-phosphate
  modified_base 13: mod_base = OTHER; note = cytidine-3'-phosphate
  modified_base 14: mod_base = OTHER; note = uridine-3'-phosphate
  modified_base 15: mod_base = OTHER; note = guanosine-3'-phosphate
  modified_base 16: mod_base = OTHER; note = uridine-3'-phosphate
  modified_base 17: mod_base = OTHER; note = adenosine-3'-phosphate
  modified_base 18: mod_base = OTHER; note = adenosine-3'-phosphate
  modified_base 19: mod_base = OTHER; note = guanosine-3'-phosphate
  misc_feature 1..19: note = RNA
  misc_feature 20..21: note = DNA
tcacagtaaaggctgtaagtt

SEQ ID NO: 2678 - DNA, 21 bp, synthetic construct
  source 1..21: mol_type = other DNA
  modified_base 1: mod_base = OTHER; note = uridine-3'-phosphate
  modified_base 2: mod_base = OTHER; note = cytidine-3'-phosphate
  modified_base 3: mod_base = OTHER; note = guanosine-3'-phosphate
  modified_base 4: mod_base = OTHER; note = adenosine-3'-phosphate
  modified_base 5: mod_base = OTHER; note = adenosine-3'-phosphate
  modified_base 6: mod_base = OTHER; note = adenosine-3'-phosphate
  modified_base 7: mod_base = OTHER; note = guanosine-3'-phosphate
  modified_base 8: mod_base = OTHER; note = cytidine-3'-phosphate
  modified_base 9: mod_base = OTHER; note = cytidine-3'-phosphate
  modified_base 10: mod_base = OTHER; note = uridine-3'-phosphate
  modified_base 11: mod_base = OTHER; note = uridine-3'-phosphate
  modified_base 12: mod_base = OTHER; note = uridine-3'-phosphate
  modified_base 13: mod_base = OTHER; note = cytidine-3'-phosphate
  modified_base 14: mod_base = OTHER; note = uridine-3'-phosphate
  modified_base 15: mod_base = OTHER; note = adenosine-3'-phosphate
  modified_base 16: mod_base = OTHER; note = adenosine-3'-phosphate
  modified_base 17: mod_base = OTHER; note = uridine-3'-phosphate
  modified_base 18: mod_base = OTHER; note = uridine-3'-phosphate
  modified_base 19: mod_base = OTHER; note = cytidine-3'-phosphate
  misc_feature 1..19: note = RNA
  misc_feature 20..21: note = DNA
tcgaaagcctttctaattctt

SEQ ID NO: 2679 - DNA, 21 bp, synthetic construct
  source 1..21: mol_type = other DNA
  modified_base 1: mod_base = OTHER; note = guanosine-3'-phosphate
  modified_base 2: mod_base = OTHER; note = guanosine-3'-phosphate
  modified_base 3: mod_base = OTHER; note = guanosine-3'-phosphate
  modified_base 4: mod_base = OTHER; note = guanosine-3'-phosphate
  modified_base 5: mod_base = OTHER; note = cytidine-3'-phosphate
  modified_base 6: mod_base = OTHER; note = adenosine-3'-phosphate
  modified_base 7: mod_base = OTHER; note = uridine-3'-phosphate
  modified_base 8: mod_base = OTHER; note = adenosine-3'-phosphate
  modified_base 9: mod_base = OTHER; note = uridine-3'-phosphate
  modified_base 10: mod_base = OTHER; note = adenosine-3'-phosphate
  modified_base 11: mod_base = OTHER; note = uridine-3'-phosphate
  modified_base 12: mod_base = OTHER; note = cytidine-3'-phosphate
  modified_base 13: mod_base = OTHER; note = guanosine-3'-phosphate
  modified_base 14: mod_base = OTHER; note = adenosine-3'-phosphate
  modified_base 15: mod_base = OTHER; note = adenosine-3'-phosphate
  modified_base 16: mod_base = OTHER; note = adenosine-3'-phosphate
  modified_base 17: mod_base = OTHER; note = guanosine-3'-phosphate
  modified_base 18: mod_base = OTHER; note = cytidine-3'-phosphate
  modified_base 19: mod_base = OTHER; note = cytidine-3'-phosphate
  misc_feature 1..19: note = RNA
  misc_feature 20..21: note = DNA
ggggcatatatcgaaagcctt

SEQ ID NO: 2680 - DNA, 21 bp, synthetic construct
  source 1..21: mol_type = other DNA
  modified_base 1: mod_base = OTHER; note = uridine-3'-phosphate
  modified_base 2: mod_base = OTHER; note = cytidine-3'-phosphate
  modified_base 3: mod_base = OTHER; note = adenosine-3'-phosphate
  modified_base 4: mod_base = OTHER; note = cytidine-3'-phosphate
  modified_base 5: mod_base = OTHER; note = cytidine-3'-phosphate
  modified_base 6: mod_base = OTHER; note = adenosine-3'-phosphate
  modified_base 7: mod_base = OTHER; note = guanosine-3'-phosphate
  modified_base 8: mod_base = OTHER; note = guanosine-3'-phosphate
  modified_base 9: mod_base = OTHER; note = guanosine-3'-phosphate
  modified_base 10: mod_base = OTHER; note = guanosine-3'-phosphate
  modified_base 11: mod_base = OTHER; note = guanosine-3'-phosphate
  modified_base 12: mod_base = OTHER; note = cytidine-3'-phosphate
  modified_base 13: mod_base = OTHER; note = adenosine-3'-phosphate
  modified_base 14: mod_base = OTHER; note = uridine-3'-phosphate
  modified_base 15: mod_base = OTHER; note = adenosine-3'-phosphate
  modified_base 16: mod_base = OTHER; note = uridine-3'-phosphate
  modified_base 17: mod_base = OTHER; note = adenosine-3'-phosphate
  modified_base 18: mod_base = OTHER; note = uridine-3'-phosphate
  modified_base 19: mod_base = OTHER; note = cytidine-3'-phosphate
  misc_feature 1..19: note = RNA
  misc_feature 20..21: note = DNA
tcaccagggggcatatatctt

SEQ ID NO: 2681 - DNA, 21 bp, synthetic construct
  source 1..21: mol_type = other DNA
  modified_base 1: mod_base = OTHER; note = adenosine-3'-phosphate
  modified_base 2: mod_base = OTHER; note = guanosine-3'-phosphate
  modified_base 3: mod_base = OTHER; note = cytidine-3'-phosphate
  modified_base 4: mod_base = OTHER; note = uridine-3'-phosphate
  modified_base 5: mod_base = OTHER; note = guanosine-3'-phosphate
  modified_base 6: mod_base = OTHER; note = uridine-3'-phosphate
  modified_base 7: mod_base = OTHER; note = guanosine-3'-phosphate
  modified_base 8: mod_base = OTHER; note = uridine-3'-phosphate
  modified_base 9: mod_base = OTHER; note = cytidine-3'-phosphate
  modified_base 10: mod_base = OTHER; note = guanosine-3'-phosphate
  modified_base 11: mod_base = OTHER; note = adenosine-3'-phosphate
  modified_base 12: mod_base = OTHER; note = uridine-3'-phosphate
  modified_base 13: mod_base = OTHER; note = uridine-3'-phosphate
  modified_base 14: mod_base = OTHER; note = uridine-3'-phosphate
  modified_base 15: mod_base = OTHER; note = uridine-3'-phosphate
  modified_base 16: mod_base = OTHER; note = cytidine-3'-phosphate
  modified_base 17: mod_base = OTHER; note = adenosine-3'-phosphate
  modified_base 18: mod_base = OTHER; note = cytidine-3'-phosphate
  modified_base 19: mod_base = OTHER; note = cytidine-3'-phosphate
  misc_feature 1..19: note = RNA
  misc_feature 20..21: note = DNA
agctgtgtcgattttcacctt

SEQ ID NO: 2682 - DNA, 21 bp, synthetic construct
  source 1..21: mol_type = other DNA
  modified_base 1: mod_base = OTHER; note = uridine-3'-phosphate
  modified_base 2: mod_base = OTHER; note = uridine-3'-phosphate
  modified_base 3: mod_base = OTHER; note = uridine-3'-phosphate
  modified_base 4: mod_base = OTHER; note = adenosine-3'-phosphate
  modified_base 5: mod_base = OTHER; note = adenosine-3'-phosphate
  modified_base 6: mod_base = OTHER; note = uridine-3'-phosphate
  modified_base 7: mod_base = OTHER; note = uridine-3'-phosphate
  modified_base 8: mod_base = OTHER; note = adenosine-3'-phosphate
  modified_base 9: mod_base = OTHER; note = guanosine-3'-phosphate
  modified_base 10: mod_base = OTHER; note = adenosine-3'-phosphate
  modified_base 11: mod_base = OTHER; note = guanosine-3'-phosphate
  modified_base 12: mod_base = OTHER; note = cytidine-3'-phosphate
  modified_base 13: mod_base = OTHER; note = uridine-3'-phosphate
  modified_base 14: mod_base = OTHER; note = guanosine-3'-phosphate
  modified_base 15: mod_base = OTHER; note = uridine-3'-phosphate
  modified_base 16: mod_base = OTHER; note = guanosine-3'-phosphate
  modified_base 17: mod_base = OTHER; note = uridine-3'-phosphate
  modified_base 18: mod_base = OTHER; note = cytidine-3'-phosphate
  modified_base 19: mod_base = OTHER; note = guanosine-3'-phosphate
  misc_feature 1..19: note = RNA
  misc_feature 20..21: note = DNA
tttaattagagctgtgtcgtt

SEQ ID NO: 2683 - DNA, 21 bp, synthetic construct
  source 1..21: mol_type = other DNA
  modified_base 1: mod_base = OTHER; note = uridine-3'-phosphate
  modified_base 2: mod_base = OTHER; note = guanosine-3'-phosphate
  modified_base 3: mod_base = OTHER; note = uridine-3'-phosphate
  modified_base 4: mod_base = OTHER; note = cytidine-3'-phosphate
  modified_base 5: mod_base = OTHER; note = adenosine-3'-phosphate
  modified_base 6: mod_base = OTHER; note = guanosine-3'-phosphate
  modified_base 7: mod_base = OTHER; note = cytidine-3'-phosphate
  modified_base 8: mod_base = OTHER; note = uridine-3'-phosphate
  modified_base 9: mod_base = OTHER; note = uridine-3'-phosphate
  modified_base 10: mod_base = OTHER; note = uridine-3'-phosphate
  modified_base 11: mod_base = OTHER; note = adenosine-3'-phosphate
  modified_base 12: mod_base = OTHER; note = adenosine-3'-phosphate
  modified_base 13: mod_base = OTHER; note = uridine-3'-phosphate
  modified_base 14: mod_base = OTHER; note = uridine-3'-phosphate
  modified_base 15: mod_base = OTHER; note = adenosine-3'-phosphate
  modified_base 16: mod_base = OTHER; note = guanosine-3'-phosphate
  modified_base 17: mod_base = OTHER; note = adenosine-3'-phosphate
  modified_base 18: mod_base = OTHER; note = guanosine-3'-phosphate
  modified_base 19: mod_base = OTHER; note = cytidine-3'-phosphate
  misc_feature 1..19: note = RNA
  misc_feature 20..21: note = DNA
tgtcagctttaattagagctt

SEQ ID NO: 2684 - DNA, 21 bp, synthetic construct
  source 1..21: mol_type = other DNA
  modified_base 1: mod_base = OTHER; note = uridine-3'-phosphate
  modified_base 2: mod_base = OTHER; note = cytidine-3'-phosphate
  modified_base 3: mod_base = OTHER; note = adenosine-3'-phosphate
  modified_base 4: mod_base = OTHER; note = adenosine-3'-phosphate
  modified_base 5: mod_base = OTHER; note = guanosine-3'-phosphate
  modified_base 6: mod_base = OTHER; note = cytidine-3'-phosphate
  modified_base 7: mod_base = OTHER; note = adenosine-3'-phosphate
  modified_base 8: mod_base = OTHER; note = guanosine-3'-phosphate
  modified_base 9: mod_base = OTHER; note = adenosine-3'-phosphate
  modified_base 10: mod_base = OTHER; note = adenosine-3'-phosphate
  modified_base 11: mod_base = OTHER; note = adenosine-3'-phosphate
  modified_base 12: mod_base = OTHER; note = guanosine-3'-phosphate
  modified_base 13: mod_base = OTHER; note = uridine-3'-phosphate
  modified_base 14: mod_base = OTHER; note = uridine-3'-phosphate
  modified_base 15: mod_base = OTHER; note = guanosine-3'-phosphate
  modified_base 16: mod_base = OTHER; note = uridine-3'-phosphate
  modified_base 17: mod_base = OTHER; note = cytidine-3'-phosphate
  modified_base 18: mod_base = OTHER; note = adenosine-3'-phosphate
  modified_base 19: mod_base = OTHER; note = guanosine-3'-phosphate
  misc_feature 1..19: note = RNA
  misc_feature 20..21: note = DNA
tcaagcagaaagttgtcagtt

SEQ ID NO: 2685 - DNA, 21 bp, synthetic construct
  source 1..21: mol_type = other DNA
  modified_base 1: mod_base = OTHER; note = uridine-3'-phosphate
  modified_base 2: mod_base = OTHER; note = guanosine-3'-phosphate
  modified_base 3: mod_base = OTHER; note = uridine-3'-phosphate
  modified_base 4: mod_base = OTHER; note = adenosine-3'-phosphate
  modified_base 5: mod_base = OTHER; note = uridine-3'-phosphate
  modified_base 6: mod_base = OTHER; note = uridine-3'-phosphate
  modified_base 7: mod_base = OTHER; note = uridine-3'-phosphate
  modified_base 8: mod_base = OTHER; note = uridine-3'-phosphate
  modified_base 9: mod_base = OTHER; note = cytidine-3'-phosphate
  modified_base 10: mod_base = OTHER; note = adenosine-3'-phosphate
  modified_base 11: mod_base = OTHER; note = adenosine-3'-phosphate
  modified_base 12: mod_base = OTHER; note = guanosine-3'-phosphate
  modified_base 13: mod_base = OTHER; note = cytidine-3'-phosphate
  modified_base 14: mod_base = OTHER; note = adenosine-3'-phosphate
  modified_base 15: mod_base = OTHER; note = guanosine-3'-phosphate
  modified_base 16: mod_base = OTHER; note = adenosine-3'-phosphate
  modified_base 17: mod_base = OTHER; note = adenosine-3'-phosphate
  modified_base 18: mod_base = OTHER; note = adenosine-3'-phosphate
  modified_base 19: mod_base = OTHER; note = guanosine-3'-phosphate
  misc_feature 1..19: note = RNA
  misc_feature 20..21: note = DNA
tgtattttcaagcagaaagtt

SEQ ID NO: 2686 - DNA, 21 bp, synthetic construct
  source 1..21: mol_type = other DNA
  modified_base 1: mod_base = OTHER; note = uridine-3'-phosphate
  modified_base 2: mod_base = OTHER; note = guanosine-3'-phosphate
  modified_base 3: mod_base = OTHER; note = guanosine-3'-phosphate
  modified_base 4: mod_base = OTHER; note = guanosine-3'-phosphate
  modified_base 5: mod_base = OTHER; note = cytidine-3'-phosphate
  modified_base 6: mod_base = OTHER; note = uridine-3'-phosphate
  modified_base 7: mod_base = OTHER; note = guanosine-3'-phosphate
  modified_base 8: mod_base = OTHER; note = guanosine-3'-phosphate
  modified_base 9: mod_base = OTHER; note = cytidine-3'-phosphate
  modified_base 10: mod_base = OTHER; note = adenosine-3'-phosphate
  modified_base 11: mod_base = OTHER; note = guanosine-3'-phosphate
  modified_base 12: mod_base = OTHER; note = uridine-3'-phosphate
  modified_base 13: mod_base = OTHER; note = guanosine-3'-phosphate
  modified_base 14: mod_base = OTHER; note = uridine-3'-phosphate
  modified_base 15: mod_base = OTHER; note = adenosine-3'-phosphate
  modified_base 16: mod_base = OTHER; note = uridine-3'-phosphate
  modified_base 17: mod_base = OTHER; note = uridine-3'-phosphate
  modified_base 18: mod_base = OTHER; note = uridine-3'-phosphate
  modified_base 19: mod_base = OTHER; note = uridine-3'-phosphate
  misc_feature 1..19: note = RNA
  misc_feature 20..21: note = DNA
tgggctggcagtgtatttttt

SEQ ID NO: 2687 - DNA, 21 bp, synthetic construct
  source 1..21: mol_type = other DNA
  modified_base 1: mod_base = OTHER; note = uridine-3'-phosphate
  modified_base 2: mod_base = OTHER; note = guanosine-3'-phosphate
  modified_base 3: mod_base = OTHER; note = uridine-3'-phosphate
  modified_base 4: mod_base = OTHER; note = adenosine-3'-phosphate
  modified_base 5: mod_base = OTHER; note = adenosine-3'-phosphate
  modified_base 6: mod_base = OTHER; note = adenosine-3'-phosphate
  modified_base 7: mod_base = OTHER; note = guanosine-3'-phosphate
  modified_base 8: mod_base = OTHER; note = guanosine-3'-phosphate
  modified_base 9: mod_base = OTHER; note = uridine-3'-phosphate
  modified_base 10: mod_base = OTHER; note = guanosine-3'-phosphate
  modified_base 11: mod_base = OTHER; note = cytidine-3'-phosphate
  modified_base 12: mod_base = OTHER; note = uridine-3'-phosphate
  modified_base 13: mod_base = OTHER; note = cytidine-3'-phosphate
  modified_base 14: mod_base = OTHER; note = uridine-3'-phosphate
  modified_base 15: mod_base = OTHER; note = guanosine-3'-phosphate
  modified_base 16: mod_base = OTHER; note = guanosine-3'-phosphate
  modified_base 17: mod_base = OTHER; note = guanosine-3'-phosphate
  modified_base 18: mod_base = OTHER; note = cytidine-3'-phosphate
  modified_base 19: mod_base = OTHER; note = uridine-3'-phosphate
  misc_feature 1..19: note = RNA
  misc_feature 20..21: note = DNA
tgtaaaggtgctctgggcttt

SEQ ID NO: 2688 - DNA, 21 bp, synthetic construct
  source 1..21: mol_type = other DNA
  modified_base 1: mod_base = OTHER; note = adenosine-3'-phosphate
  modified_base 2: mod_base = OTHER; note = uridine-3'-phosphate
  modified_base 3: mod_base = OTHER; note = guanosine-3'-phosphate
  modified_base 4: mod_base = OTHER; note = guanosine-3'-phosphate
  modified_base 5: mod_base = OTHER; note = cytidine-3'-phosphate
  modified_base 6: mod_base = OTHER; note = cytidine-3'-phosphate
  modified_base 7: mod_base = OTHER; note = adenosine-3'-phosphate
  modified_base 8: mod_base = OTHER; note = adenosine-3'-phosphate
  modified_base 9: mod_base = OTHER; note = uridine-3'-phosphate
  modified_base 10: mod_base = OTHER; note = guanosine-3'-phosphate
  modified_base 11: mod_base = OTHER; note = uridine-3'-phosphate
  modified_base 12: mod_base = OTHER; note = adenosine-3'-phosphate
  modified_base 13: mod_base = OTHER; note = adenosine-3'-phosphate
  modified_base 14: mod_base = OTHER; note = adenosine-3'-phosphate
  modified_base 15: mod_base = OTHER; note = guanosine-3'-phosphate
  modified_base 16: mod_base = OTHER; note = guanosine-3'-phosphate
  modified_base 17: mod_base = OTHER; note = uridine-3'-phosphate
  modified_base 18: mod_base = OTHER; note = guanosine-3'-phosphate
  modified_base 19: mod_base = OTHER; note = cytidine-3'-phosphate
  misc_feature 1..19: note = RNA
  misc_feature 20..21: note = DNA
atggccaatgtaaaggtgctt

SEQ ID NO: 2689 - DNA, 21 bp, synthetic construct
  source 1..21: mol_type = other DNA
  modified_base 1: mod_base = OTHER; note = adenosine-3'-phosphate
  modified_base 2: mod_base = OTHER; note = cytidine-3'-phosphate
  modified_base 3: mod_base = OTHER; note = guanosine-3'-phosphate
  modified_base 4: mod_base = OTHER; note = cytidine-3'-phosphate
  modified_base 5: mod_base = OTHER; note = adenosine-3'-phosphate
  modified_base 6: mod_base = OTHER; note = guanosine-3'-phosphate
  modified_base 7: mod_base = OTHER; note = adenosine-3'-phosphate
  modified_base 8: mod_base = OTHER; note = adenosine-3'-phosphate
  modified_base 9: mod_base = OTHER; note = adenosine-3'-phosphate
  modified_base 10: mod_base = OTHER; note = uridine-3'-phosphate
  modified_base 11: mod_base = OTHER; note = guanosine-3'-phosphate
  modified_base 12: mod_base = OTHER; note = guanosine-3'-phosphate
  modified_base 13: mod_base = OTHER; note = cytidine-3'-phosphate
  modified_base 14: mod_base = OTHER; note = cytidine-3'-phosphate
  modified_base 15: mod_base = OTHER; note = adenosine-3'-phosphate
  modified_base 16: mod_base = OTHER; note = adenosine-3'-phosphate
  modified_base 17: mod_base = OTHER; note = uridine-3'-phosphate
  modified_base 18: mod_base = OTHER; note = guanosine-3'-phosphate
  modified_base 19: mod_base = OTHER; note = uridine-3'-phosphate
  misc_feature 1..19: note = RNA
  misc_feature 20..21: note = DNA
acgcagaaatggccaatgttt

SEQ ID NO: 2690 - DNA, 21 bp, synthetic construct
  source 1..21: mol_type = other DNA
  modified_base 1: mod_base = OTHER; note = adenosine-3'-phosphate
  modified_base 2: mod_base = OTHER; note = guanosine-3'-phosphate
  modified_base 3: mod_base = OTHER; note = guanosine-3'-phosphate
  modified_base 4: mod_base = OTHER; note = guanosine-3'-phosphate
  modified_base 5: mod_base = OTHER; note = adenosine-3'-phosphate
  modified_base 6: mod_base = OTHER; note = adenosine-3'-phosphate
  modified_base 7: mod_base = OTHER; note = adenosine-3'-phosphate
  modified_base 8: mod_base = OTHER; note = guanosine-3'-phosphate
  modified_base 9: mod_base = OTHER; note = adenosine-3'-phosphate
  modified_base 10: mod_base = OTHER; note = guanosine-3'-phosphate
  modified_base 11: mod_base = OTHER; note = cytidine-3'-phosphate
  modified_base 12: mod_base = OTHER; note = adenosine-3'-phosphate
  modified_base 13: mod_base = OTHER; note = uridine-3'-phosphate
  modified_base 14: mod_base = OTHER; note = adenosine-3'-phosphate
  modified_base 15: mod_base = OTHER; note = cytidine-3'-phosphate
  modified_base 16: mod_base = OTHER; note = guanosine-3'-phosphate
  modified_base 17: mod_base = OTHER; note = cytidine-3'-phosphate
  modified_base 18: mod_base = OTHER; note = adenosine-3'-phosphate
  modified_base 19: mod_base = OTHER; note = guanosine-3'-phosphate
  misc_feature 1..19: note = RNA
  misc_feature 20..21: note = DNA
agggaaagagcatacgcagtt

SEQ ID NO: 2691 - DNA, 21 bp, synthetic construct
  source 1..21: mol_type = other DNA
  modified_base 1: mod_base = OTHER; note = uridine-3'-phosphate
  modified_base 2: mod_base = OTHER; note = uridine-3'-phosphate
  modified_base 3: mod_base = OTHER; note = uridine-3'-phosphate
  modified_base 4: mod_base = OTHER; note = uridine-3'-phosphate
  modified_base 5: mod_base = OTHER; note = adenosine-3'-phosphate
  modified_base 6: mod_base = OTHER; note = uridine-3'-phosphate
  modified_base 7: mod_base = OTHER; note = cytidine-3'-phosphate
  modified_base 8: mod_base = OTHER; note = uridine-3'-phosphate
  modified_base 9: mod_base = OTHER; note = cytidine-3'-phosphate
  modified_base 10: mod_base = OTHER; note = cytidine-3'-phosphate
  modified_base 11: mod_base = OTHER; note = cytidine-3'-phosphate
  modified_base 12: mod_base = OTHER; note = adenosine-3'-phosphate
  modified_base 13: mod_base = OTHER; note = guanosine-3'-phosphate
  modified_base 14: mod_base = OTHER; note = guanosine-3'-phosphate
  modified_base 15: mod_base = OTHER; note = guanosine-3'-phosphate
  modified_base 16: mod_base = OTHER; note = adenosine-3'-phosphate
  modified_base 17: mod_base = OTHER; note = adenosine-3'-phosphate
  modified_base 18: mod_base = OTHER; note = adenosine-3'-phosphate
  modified_base 19: mod_base = OTHER; note = guanosine-3'-phosphate
  misc_feature 1..19: note = RNA
  misc_feature 20..21: note = DNA
ttttatctcccagggaaagtt

SEQ ID NO: 2692 - DNA, 21 bp, synthetic construct
  source 1..21: mol_type = other DNA
  modified_base 1: mod_base = OTHER; note = uridine-3'-phosphate
  modified_base 2: mod_base = OTHER; note = guanosine-3'-phosphate
  modified_base 3: mod_base = OTHER; note = uridine-3'-phosphate
  modified_base 4: mod_base = OTHER; note = guanosine-3'-phosphate
  modified_base 5: mod_base = OTHER; note = guanosine-3'-phosphate
  modified_base 6: mod_base = OTHER; note = guanosine-3'-phosphate
  modified_base 7: mod_base = OTHER; note = uridine-3'-phosphate
  modified_base 8: mod_base = OTHER; note = guanosine-3'-phosphate
  modified_base 9: mod_base = OTHER; note = adenosine-3'-phosphate
  modified_base 10: mod_base = OTHER; note = guanosine-3'-phosphate
  modified_base 11: mod_base = OTHER; note = uridine-3'-phosphate
  modified_base 12: mod_base = OTHER; note = uridine-3'-phosphate
  modified_base 13: mod_base = OTHER; note = uridine-3'-phosphate
  modified_base 14: mod_base = OTHER; note = uridine-3'-phosphate
  modified_base 15: mod_base = OTHER; note = adenosine-3'-phosphate
  modified_base 16: mod_base = OTHER; note = uridine-3'-phosphate
  modified_base 17: mod_base = OTHER; note = cytidine-3'-phosphate
  modified_base 18: mod_base = OTHER; note = uridine-3'-phosphate
  modified_base 19: mod_base = OTHER; note = cytidine-3'-phosphate
  misc_feature 1..19: note = RNA
  misc_feature 20..21: note = DNA
tgtgggtgagttttatctctt

SEQ ID NO: 2693 - DNA, 21 bp, synthetic construct
  source 1..21: mol_type = other DNA
  modified_base 1: mod_base = OTHER; note = adenosine-3'-phosphate
  modified_base 2: mod_base = OTHER; note = adenosine-3'-phosphate
  modified_base 3: mod_base = OTHER; note = cytidine-3'-phosphate
  modified_base 4: mod_base = OTHER; note = guanosine-3'-phosphate
  modified_base 5: mod_base = OTHER; note = adenosine-3'-phosphate
  modified_base 6: mod_base = OTHER; note = adenosine-3'-phosphate
  modified_base 7: mod_base = OTHER; note = adenosine-3'-phosphate
  modified_base 8: mod_base = OTHER; note = cytidine-3'-phosphate
  modified_base 9: mod_base = OTHER; note = uridine-3'-phosphate
  modified_base 10: mod_base = OTHER; note = guanosine-3'-phosphate
  modified_base 11: mod_base = OTHER; note = uridine-3'-phosphate
  modified_base 12: mod_base = OTHER; note = guanosine-3'-phosphate
  modified_base 13: mod_base = OTHER; note = guanosine-3'-phosphate
  modified_base 14: mod_base = OTHER; note = guanosine-3'-phosphate
  modified_base 15: mod_base = OTHER; note = uridine-3'-phosphate
  modified_base 16: mod_base = OTHER; note = guanosine-3'-phosphate
  modified_base 17: mod_base = OTHER; note = adenosine-3'-phosphate
  modified_base 18: mod_base = OTHER; note = guanosine-3'-phosphate
  modified_base 19: mod_base = OTHER; note = uridine-3'-phosphate
  misc_feature 1..19: note = RNA
  misc_feature 20..21: note = DNA
aacgaaactgtgggtgagttt

SEQ ID NO: 2694 - DNA, 21 bp, synthetic construct
  source 1..21: mol_type = other DNA
  modified_base 1: mod_base = OTHER; note = adenosine-3'-phosphate
  modified_base 2: mod_base = OTHER; note = adenosine-3'-phosphate
  modified_base 3: mod_base = OTHER; note = adenosine-3'-phosphate
  modified_base 4: mod_base = OTHER; note = cytidine-3'-phosphate
  modified_base 5: mod_base = OTHER; note = adenosine-3'-phosphate
  modified_base 6: mod_base = OTHER; note = adenosine-3'-phosphate
  modified_base 7: mod_base = OTHER; note = uridine-3'-phosphate
  modified_base 8: mod_base = OTHER; note = uridine-3'-phosphate
  modified_base 9: mod_base = OTHER; note = guanosine-3'-phosphate
  modified_base 10: mod_base = OTHER; note = adenosine-3'-phosphate
  modified_base 11: mod_base = OTHER; note = adenosine-3'-phosphate
  modified_base 12: mod_base = OTHER; note = cytidine-3'-phosphate
  modified_base 13: mod_base = OTHER; note = guanosine-3'-phosphate
  modified_base 14: mod_base = OTHER; note = adenosine-3'-phosphate
  modified_base 15: mod_base = OTHER; note = adenosine-3'-phosphate
  modified_base 16: mod_base = OTHER; note = adenosine-3'-phosphate
  modified_base 17: mod_base = OTHER; note = cytidine-3'-phosphate
  modified_base 18: mod_base = OTHER; note = uridine-3'-phosphate
  modified_base 19: mod_base = OTHER; note = guanosine-3'-phosphate
  misc_feature 1..19: note = RNA
  misc_feature 20..21: note = DNA
aaacaattgaacgaaactgtt

SEQ ID NO: 2695 - DNA, 21 bp, synthetic construct
  source 1..21: mol_type = other DNA
  modified_base 1: mod_base = OTHER; note = uridine-3'-phosphate
  modified_base 2: mod_base = OTHER; note = uridine-3'-phosphate
  modified_base 3: mod_base = OTHER; note = cytidine-3'-phosphate
  modified_base 4: mod_base = OTHER; note = adenosine-3'-phosphate
  modified_base 5: mod_base = OTHER; note = adenosine-3'-phosphate
  modified_base 6: mod_base = OTHER; note = adenosine-3'-phosphate
  modified_base 7: mod_base = OTHER; note = guanosine-3'-phosphate
  modified_base 8: mod_base = OTHER; note = cytidine-3'-phosphate
  modified_base 9: mod_base = OTHER; note = uridine-3'-phosphate
  modified_base 10: mod_base = OTHER; note = guanosine-3'-phosphate
  modified_base 11: mod_base = OTHER; note = adenosine-3'-phosphate
  modified_base 12: mod_base = OTHER; note = adenosine-3'-phosphate
  modified_base 13: mod_base = OTHER; note = adenosine-3'-phosphate
  modified_base 14: mod_base = OTHER; note = cytidine-3'-phosphate
  modified_base 15: mod_base = OTHER; note = adenosine-3'-phosphate
  modified_base 16: mod_base = OTHER; note = adenosine-3'-phosphate
  modified_base 17: mod_base = OTHER; note = uridine-3'-phosphate
  modified_base 18: mod_base = OTHER; note = uridine-3'-phosphate
  modified_base 19: mod_base = OTHER; note = guanosine-3'-phosphate
  misc_feature 1..19: note = RNA
  misc_feature 20..21: note = DNA
ttcaaagctgaaacaattgtt

SEQ ID NO: 2696 - DNA, 21 bp, synthetic construct
  source 1..21: mol_type = other DNA
  modified_base 1: mod_base = OTHER; note = adenosine-3'-phosphate
  modified_base 2: mod_base = OTHER; note = adenosine-3'-phosphate
  modified_base 3: mod_base = OTHER; note = adenosine-3'-phosphate
  modified_base 4: mod_base = OTHER; note = guanosine-3'-phosphate
  modified_base 5: mod_base = OTHER; note = cytidine-3'-phosphate
  modified_base 6: mod_base = OTHER; note = uridine-3'-phosphate
  modified_base 7: mod_base = OTHER; note = uridine-3'-phosphate
  modified_base 8: mod_base = OTHER; note = cytidine-3'-phosphate
  modified_base 9: mod_base = OTHER; note = uridine-3'-phosphate
  modified_base 10: mod_base = OTHER; note = cytidine-3'-phosphate
  modified_base 11: mod_base = OTHER; note = uridine-3'-phosphate
  modified_base 12: mod_base = OTHER; note = cytidine-3'-phosphate
  modified_base 13: mod_base = OTHER; note = uridine-3'-phosphate
  modified_base 14: mod_base = OTHER; note = uridine-3'-phosphate
  modified_base 15: mod_base = OTHER; note = cytidine-3'-phosphate
  modified_base 16: mod_base = OTHER; note = adenosine-3'-phosphate
  modified_base 17: mod_base = OTHER; note = adenosine-3'-phosphate
  modified_base 18: mod_base = OTHER; note = adenosine-3'-phosphate
  modified_base 19: mod_base = OTHER; note = guanosine-3'-phosphate
  misc_feature 1..19: note = RNA
  misc_feature 20..21: note = DNA
aaagcttctctcttcaaagtt

SEQ ID NO: 2697 - DNA, 21 bp, synthetic construct
  source 1..21: mol_type = other DNA
  modified_base 1: mod_base = OTHER; note = uridine-3'-phosphate
  modified_base 2: mod_base = OTHER; note = uridine-3'-phosphate
  modified_base 3: mod_base = OTHER; note = uridine-3'-phosphate
  modified_base 4: mod_base = OTHER; note = adenosine-3'-phosphate
  modified_base 5: mod_base = OTHER; note = adenosine-3'-phosphate
  modified_base 6: mod_base = OTHER; note = cytidine-3'-phosphate
  modified_base 7: mod_base = OTHER; note = cytidine-3'-phosphate
  modified_base 8: mod_base = OTHER; note = adenosine-3'-phosphate
  modified_base 9: mod_base = OTHER; note = adenosine-3'-phosphate
  modified_base 10: mod_base = OTHER; note = adenosine-3'-phosphate
  modified_base 11: mod_base = OTHER; note = guanosine-3'-phosphate
  modified_base 12: mod_base = OTHER; note = cytidine-3'-phosphate
  modified_base 13: mod_base = OTHER; note = uridine-3'-phosphate
  modified_base 14: mod_base = OTHER; note = uridine-3'-phosphate
  modified_base 15: mod_base = OTHER; note = cytidine-3'-phosphate
  modified_base 16: mod_base = OTHER; note = uridine-3'-phosphate
  modified_base 17: mod_base = OTHER; note = cytidine-3'-phosphate
  modified_base 18: mod_base = OTHER; note = uridine-3'-phosphate
  modified_base 19: mod_base = OTHER; note = cytidine-3'-phosphate
  misc_feature 1..19: note = RNA
  misc_feature 20..21: note = DNA
tttaaccaaagcttctctctt

SEQ ID NO: 2698 - DNA, 21 bp, synthetic construct
  source 1..21: mol_type = other DNA
  modified_base 1: mod_base = OTHER; note = uridine-3'-phosphate
  modified_base 2: mod_base = OTHER; note = guanosine-3'-phosphate
  modified_base 3: mod_base = OTHER; note = guanosine-3'-phosphate
  modified_base 4: mod_base = OTHER; note = guanosine-3'-phosphate
  modified_base 5: mod_base = OTHER; note = uridine-3'-phosphate
  modified_base 6: mod_base = OTHER; note = guanosine-3'-phosphate
  modified_base 7: mod_base = OTHER; note = guanosine-3'-phosphate
  modified_base 8: mod_base = OTHER; note = adenosine-3'-phosphate
  modified_base 9: mod_base = OTHER; note = uridine-3'-phosphate
  modified_base 10: mod_base = OTHER; note = uridine-3'-phosphate
  modified_base 11: mod_base = OTHER; note = adenosine-3'-phosphate
  modified_base 12: mod_base = OTHER; note = cytidine-3'-phosphate
  modified_base 13: mod_base = OTHER; note = cytidine-3'-phosphate
  modified_base 14: mod_base = OTHER; note = uridine-3'-phosphate
  modified_base 15: mod_base = OTHER; note = uridine-3'-phosphate
  modified_base 16: mod_base = OTHER; note = uridine-3'-phosphate
  modified_base 17: mod_base = OTHER; note = adenosine-3'-phosphate
  modified_base 18: mod_base = OTHER; note = adenosine-3'-phosphate
  modified_base 19: mod_base = OTHER; note = cytidine-3'-phosphate
  misc_feature 1..19: note = RNA
  misc_feature 20..21: note = DNA
tgggtggattacctttaactt

SEQ ID NO: 2699 - DNA, 21 bp, synthetic construct
  source 1..21: mol_type = other DNA
  modified_base 1: mod_base = OTHER; note = adenosine-3'-phosphate
  modified_base 2: mod_base = OTHER; note = adenosine-3'-phosphate
  modified_base 3: mod_base = OTHER; note = cytidine-3'-phosphate
  modified_base 4: mod_base = OTHER; note = guanosine-3'-phosphate
  modified_base 5: mod_base = OTHER; note = adenosine-3'-phosphate
  modified_base 6: mod_base = OTHER; note = uridine-3'-phosphate
  modified_base 7: mod_base = OTHER; note = adenosine-3'-phosphate
  modified_base 8: mod_base = OTHER; note = adenosine-3'-phosphate
  modified_base 9: mod_base = OTHER; note = adenosine-3'-phosphate
  modified_base 10: mod_base = OTHER; note = uridine-3'-phosphate
  modified_base 11: mod_base = OTHER; note = guanosine-3'-phosphate
  modified_base 12: mod_base = OTHER; note = guanosine-3'-phosphate
  modified_base 13: mod_base = OTHER; note = guanosine-3'-phosphate
  modified_base 14: mod_base = OTHER; note = uridine-3'-phosphate
  modified_base 15: mod_base = OTHER; note = guanosine-3'-phosphate
  modified_base 16: mod_base = OTHER; note = guanosine-3'-phosphate
  modified_base 17: mod_base = OTHER; note = adenosine-3'-phosphate
  modified_base 18: mod_base = OTHER; note = uridine-3'-phosphate
  modified_base 19: mod_base = OTHER; note = uridine-3'-phosphate
  misc_feature 1..19: note = RNA
  misc_feature 20..21: note = DNA
aacgataaatgggtggatttt

SEQ ID NO: 2700 - DNA, 21 bp, synthetic construct
  source 1..21: mol_type = other DNA
  modified_base 1: mod_base = OTHER; note = uridine-3'-phosphate
  modified_base 2: mod_base = OTHER; note = uridine-3'-phosphate
  modified_base 3: mod_base = OTHER; note = uridine-3'-phosphate
  modified_base 4: mod_base = OTHER; note = cytidine-3'-phosphate
  modified_base 5: mod_base = OTHER; note = cytidine-3'-phosphate
  modified_base 6: mod_base = OTHER; note = adenosine-3'-phosphate
  modified_base 7: mod_base = OTHER; note = adenosine-3'-phosphate
  modified_base 8: mod_base = OTHER; note = adenosine-3'-phosphate
  modified_base 9: mod_base = OTHER; note = adenosine-3'-phosphate
  modified_base 10: mod_base = OTHER; note = adenosine-3'-phosphate
  modified_base 11: mod_base = OTHER; note = cytidine-3'-phosphate
  modified_base 12: mod_base = OTHER; note = guanosine-3'-phosphate
  modified_base 13: mod_base = OTHER; note = adenosine-3'-phosphate
  modified_base 14: mod_base = OTHER; note = uridine-3'-phosphate
  modified_base 15: mod_base = OTHER; note = adenosine-3'-phosphate
  modified_base 16: mod_base = OTHER; note = adenosine-3'-phosphate
  modified_base 17: mod_base = OTHER; note = adenosine-3'-phosphate
  modified_base 18: mod_base = OTHER; note = uridine-3'-phosphate
  modified_base 19: mod_base = OTHER; note = guanosine-3'-phosphate
  misc_feature 1..19: note = RNA
  misc_feature 20..21: note = DNA
tttccaaaaacgataaatgtt

SEQ ID NO: 2701 - DNA, 21 bp, synthetic construct
  source 1..21: mol_type = other DNA
  modified_base 1: mod_base = OTHER; note = uridine-3'-phosphate
  modified_base 2: mod_base = OTHER; note = guanosine-3'-phosphate
  modified_base 3: mod_base = OTHER; note = adenosine-3'-phosphate
  modified_base 4: mod_base = OTHER; note = adenosine-3'-phosphate
  modified_base 5: mod_base = OTHER; note = guanosine-3'-phosphate
  modified_base 6: mod_base = OTHER; note = adenosine-3'-phosphate
  modified_base 7: mod_base = OTHER; note = uridine-3'-phosphate
  modified_base 8: mod_base = OTHER; note = uridine-3'-phosphate
  modified_base 9: mod_base = OTHER; note = guanosine-3'-phosphate
  modified_base 10: mod_base = OTHER; note = uridine-3'-phosphate
  modified_base 11: mod_base = OTHER; note = cytidine-3'-phosphate
  modified_base 12: mod_base = OTHER; note = uridine-3'-phosphate
  modified_base 13: mod_base = OTHER; note = uridine-3'-phosphate
  modified_base 14: mod_base = OTHER; note = uridine-3'-phosphate
  modified_base 15: mod_base = OTHER; note = cytidine-3'-phosphate
  modified_base 16: mod_base = OTHER; note = cytidine-3'-phosphate
  modified_base 17: mod_base = OTHER; note = adenosine-3'-phosphate
  modified_base 18: mod_base = OTHER; note = adenosine-3'-phosphate
  modified_base 19: mod_base = OTHER; note = adenosine-3'-phosphate
  misc_feature 1..19: note = RNA
  misc_feature 20..21: note = DNA
tgaagattgtctttccaaatt

SEQ ID NO: 2702 - DNA, 21 bp, synthetic construct
  source 1..21: mol_type = other DNA
  modified_base 1: mod_base = OTHER; note = uridine-3'-phosphate
  modified_base 2: mod_base = OTHER; note = guanosine-3'-phosphate
  modified_base 3: mod_base = OTHER; note = uridine-3'-phosphate
  modified_base 4: mod_base = OTHER; note = cytidine-3'-phosphate
  modified_base 5: mod_base = OTHER; note = uridine-3'-phosphate
  modified_base 6: mod_base = OTHER; note = uridine-3'-phosphate
  modified_base 7: mod_base = OTHER; note = uridine-3'-phosphate
  modified_base 8: mod_base = OTHER; note = adenosine-3'-phosphate
  modified_base 9: mod_base = OTHER; note = uridine-3'-phosphate
  modified_base 10: mod_base = OTHER; note = guanosine-3'-phosphate
  modified_base 11: mod_base = OTHER; note = cytidine-3'-phosphate
  modified_base 12: mod_base = OTHER; note = uridine-3'-phosphate
  modified_base 13: mod_base = OTHER; note = guanosine-3'-phosphate
  modified_base 14: mod_base = OTHER; note = adenosine-3'-phosphate
  modified_base 15: mod_base = OTHER; note = adenosine-3'-phosphate
  modified_base 16: mod_base = OTHER; note = guanosine-3'-phosphate
  modified_base 17: mod_base = OTHER; note = adenosine-3'-phosphate
  modified_base 18: mod_base = OTHER; note = uridine-3'-phosphate
  modified_base 19: mod_base = OTHER; note = uridine-3'-phosphate
  misc_feature 1..19: note = RNA
  misc_feature 20..21: note = DNA
tgtctttatgctgaagatttt

SEQ ID NO: 2703 - DNA, 21 bp, synthetic construct
  source 1..21: mol_type = other DNA
  modified_base 1: mod_base = OTHER; note = adenosine-3'-phosphate
  modified_base 2: mod_base = OTHER; note = cytidine-3'-phosphate
  modified_base 3: mod_base = OTHER; note = cytidine-3'-phosphate
  modified_base 4: mod_base = OTHER; note = adenosine-3'-phosphate
  modified_base 5: mod_base = OTHER; note = guanosine-3'-phosphate
  modified_base 6: mod_base = OTHER; note = uridine-3'-phosphate
  modified_base 7: mod_base = OTHER; note = guanosine-3'-phosphate
  modified_base 8: mod_base = OTHER; note = uridine-3'-phosphate
  modified_base 9: mod_base = OTHER; note = uridine-3'-phosphate
  modified_base 10: mod_base = OTHER; note = adenosine-3'-phosphate
  modified_base 11: mod_base = OTHER; note = guanosine-3'-phosphate
  modified_base 12: mod_base = OTHER; note = guanosine-3'-phosphate
  modified_base 13: mod_base = OTHER; note = uridine-3'-phosphate
  modified_base 14: mod_base = OTHER; note = adenosine-3'-phosphate
  modified_base 15: mod_base = OTHER; note = cytidine-3'-phosphate
  modified_base 16: mod_base = OTHER; note = adenosine-3'-phosphate
  modified_base 17: mod_base = OTHER; note = guanosine-3'-phosphate
  modified_base 18: mod_base = OTHER; note = adenosine-3'-phosphate
  modified_base 19: mod_base = OTHER; note = guanosine-3'-phosphate
  misc_feature 1..19: note = RNA
  misc_feature 20..21: note = DNA
accagtgttaggtacagagtt

SEQ ID NO: 2704 - DNA, 21 bp, synthetic construct
  source 1..21: mol_type = other DNA
  modified_base 1: mod_base = OTHER; note = adenosine-3'-phosphate
  modified_base 2: mod_base = OTHER; note = uridine-3'-phosphate
  modified_base 3: mod_base = OTHER; note = adenosine-3'-phosphate
  modified_base 4: mod_base = OTHER; note = cytidine-3'-phosphate
  modified_base 5: mod_base = OTHER; note = guanosine-3'-phosphate
  modified_base 6: mod_base = OTHER; note = uridine-3'-phosphate
  modified_base 7: mod_base = OTHER; note = guanosine-3'-phosphate
  modified_base 8: mod_base = OTHER; note = cytidine-3'-phosphate
  modified_base 9: mod_base = OTHER; note = cytidine-3'-phosphate
  modified_base 10: mod_base = OTHER; note = guanosine-3'-phosphate
  modified_base 11: mod_base = OTHER; note = uridine-3'-phosphate
  modified_base 12: mod_base = OTHER; note = adenosine-3'-phosphate
  modified_base 13: mod_base = OTHER; note = cytidine-3'-phosphate
  modified_base 14: mod_base = OTHER; note = cytidine-3'-phosphate
  modified_base 15: mod_base = OTHER; note = adenosine-3'-phosphate
  modified_base 16: mod_base = OTHER; note = guanosine-3'-phosphate
  modified_base 17: mod_base = OTHER; note = uridine-3'-phosphate
  modified_base 18: mod_base = OTHER; note = guanosine-3'-phosphate
  modified_base 19: mod_base = OTHER; note = uridine-3'-phosphate
  misc_feature 1..19: note = RNA
  misc_feature 20..21: note = DNA
atacgtgccgtaccagtgttt

SEQ ID NO: 2705 - DNA, 21 bp, synthetic construct
  source 1..21: mol_type = other DNA
  modified_base 1: mod_base = OTHER; note = uridine-3'-phosphate
  modified_base 2: mod_base = OTHER; note = guanosine-3'-phosphate
  modified_base 3: mod_base = OTHER; note = uridine-3'-phosphate
  modified_base 4: mod_base = OTHER; note = uridine-3'-phosphate
  modified_base 5: mod_base = OTHER; note = uridine-3'-phosphate
  modified_base 6: mod_base = OTHER; note = cytidine-3'-phosphate
  modified_base 7: mod_base = OTHER; note = uridine-3'-phosphate
  modified_base 8: mod_base = OTHER; note = adenosine-3'-phosphate
  modified_base 9: mod_base = OTHER; note = cytidine-3'-phosphate
  modified_base 10: mod_base = OTHER; note = cytidine-3'-phosphate
  modified_base 11: mod_base = OTHER; note = adenosine-3'-phosphate
  modified_base 12: mod_base = OTHER; note = uridine-3'-phosphate
  modified_base 13: mod_base = OTHER; note = adenosine-3'-phosphate
  modified_base 14: mod_base = OTHER; note = cytidine-3'-phosphate
  modified_base 15: mod_base = OTHER; note = guanosine-3'-phosphate
  modified_base 16: mod_base = OTHER; note = uridine-3'-phosphate
  modified_base 17: mod_base = OTHER; note = guanosine-3'-phosphate
  modified_base 18: mod_base = OTHER; note = cytidine-3'-phosphate
  modified_base 19: mod_base = OTHER; note = cytidine-3'-phosphate
  misc_feature 1..19: note = RNA
  misc_feature 20..21: note = DNA
tgtttctaccatacgtgcctt

SEQ ID NO: 2706 - DNA, 21 bp, synthetic construct
  source 1..21: mol_type = other DNA
  modified_base 1: mod_base = OTHER; note = adenosine-3'-phosphate
  modified_base 2: mod_base = OTHER; note = uridine-3'-phosphate
  modified_base 3: mod_base = OTHER; note = adenosine-3'-phosphate
  modified_base 4: mod_base = OTHER; note = guanosine-3'-phosphate
  modified_base 5: mod_base = OTHER; note = guanosine-3'-phosphate
  modified_base 6: mod_base = OTHER; note = cytidine-3'-phosphate
  modified_base 7: mod_base = OTHER; note = adenosine-3'-phosphate
  modified_base 8: mod_base = OTHER; note = guanosine-3'-phosphate
  modified_base 9: mod_base = OTHER; note = uridine-3'-phosphate
  modified_base 10: mod_base = OTHER; note = uridine-3'-phosphate
  modified_base 11: mod_base = OTHER; note = guanosine-3'-phosphate
  modified_base 12: mod_base = OTHER; note = uridine-3'-phosphate
  modified_base 13: mod_base = OTHER; note = uridine-3'-phosphate
  modified_base 14: mod_base = OTHER; note = uridine-3'-phosphate
  modified_base 15: mod_base = OTHER; note = cytidine-3'-phosphate
  modified_base 16: mod_base = OTHER; note = uridine-3'-phosphate
  modified_base 17: mod_base = OTHER; note = adenosine-3'-phosphate
  modified_base 18: mod_base = OTHER; note = cytidine-3'-phosphate
  modified_base 19: mod_base = OTHER; note = cytidine-3'-phosphate
  misc_feature 1..19: note = RNA
  misc_feature 20..21: note = DNA
ataggcagttgtttctacctt

SEQ ID NO: 2707 - DNA, 21 bp, synthetic construct
  source 1..21: mol_type = other DNA
  modified_base 1: mod_base = OTHER; note = adenosine-3'-phosphate
  modified_base 2: mod_base = OTHER; note = guanosine-3'-phosphate
  modified_base 3: mod_base = OTHER; note = uridine-3'-phosphate
  modified_base 4: mod_base = OTHER; note = adenosine-3'-phosphate
  modified_base 5: mod_base = OTHER; note = adenosine-3'-phosphate
  modified_base 6: mod_base = OTHER; note = adenosine-3'-phosphate
  modified_base 7: mod_base = OTHER; note = guanosine-3'-phosphate
  modified_base 8: mod_base = OTHER; note = cytidine-3'-phosphate
  modified_base 9: mod_base = OTHER; note = adenosine-3'-phosphate
  modified_base 10: mod_base = OTHER; note = uridine-3'-phosphate
  modified_base 11: mod_base = OTHER; note = adenosine-3'-phosphate
  modified_base 12: mod_base = OTHER; note = guanosine-3'-phosphate
  modified_base 13: mod_base = OTHER; note = guanosine-3'-phosphate
  modified_base 14: mod_base = OTHER; note = cytidine-3'-phosphate
  modified_base 15: mod_base = OTHER; note = adenosine-3'-phosphate
  modified_base 16: mod_base = OTHER; note = guanosine-3'-phosphate
  modified_base 17: mod_base = OTHER; note = uridine-3'-phosphate
  modified_base 18: mod_base = OTHER; note = uridine-3'-phosphate
  modified_base 19: mod_base = OTHER; note = guanosine-3'-phosphate
  misc_feature 1..19: note = RNA
  misc_feature 20..21: note = DNA
agtaaagcataggcagttgtt

SEQ ID NO: 2708 - DNA, 21 bp, synthetic construct
  source 1..21: mol_type = other DNA
  modified_base 1: mod_base = OTHER; note = uridine-3'-phosphate
  modified_base 2: mod_base = OTHER; note = uridine-3'-phosphate
  modified_base 3: mod_base = OTHER; note = cytidine-3'-phosphate
  modified_base 4: mod_base = OTHER; note = adenosine-3'-phosphate
  modified_base 5: mod_base = OTHER; note = guanosine-3'-phosphate
  modified_base 6: mod_base = OTHER; note = adenosine-3'-phosphate
  modified_base 7: mod_base = OTHER; note = cytidine-3'-phosphate
  modified_base 8: mod_base = OTHER; note = uridine-3'-phosphate
  modified_base 9: mod_base = OTHER; note = guanosine-3'-phosphate
  modified_base 10: mod_base = OTHER; note = guanosine-3'-phosphate
  modified_base 11: mod_base = OTHER; note = uridine-3'-phosphate
  modified_base 12: mod_base = OTHER; note = guanosine-3'-phosphate
  modified_base 13: mod_base = OTHER; note = adenosine-3'-phosphate
  modified_base 14: mod_base = OTHER; note = guanosine-3'-phosphate
  modified_base 15: mod_base = OTHER; note = uridine-3'-phosphate
  modified_base 16: mod_base = OTHER; note = adenosine-3'-phosphate
  modified_base 17: mod_base = OTHER; note = adenosine-3'-phosphate
  modified_base 18: mod_base = OTHER; note = adenosine-3'-phosphate
  modified_base 19: mod_base = OTHER; note = guanosine-3'-phosphate
  misc_feature 1..19: note = RNA
  misc_feature 20..21: note = DNA
ttcagactggtgagtaaagtt

SEQ ID NO: 2709 - DNA, 21 bp, synthetic construct
  source 1..21: mol_type = other DNA
  modified_base 1: mod_base = OTHER; note = adenosine-3'-phosphate
  modified_base 2: mod_base = OTHER; note = uridine-3'-phosphate
  modified_base 3: mod_base = OTHER; note = adenosine-3'-phosphate
  modified_base 4: mod_base = OTHER; note = uridine-3'-phosphate
  modified_base 5: mod_base = OTHER; note = cytidine-3'-phosphate
  modified_base 6: mod_base = OTHER; note = uridine-3'-phosphate
  modified_base 7: mod_base = OTHER; note = uridine-3'-phosphate
  modified_base 8: mod_base = OTHER; note = uridine-3'-phosphate
  modified_base 9: mod_base = OTHER; note = cytidine-3'-phosphate
  modified_base 10: mod_base = OTHER; note = adenosine-3'-phosphate
  modified_base 11: mod_base = OTHER; note = adenosine-3'-phosphate
  modified_base 12: mod_base = OTHER; note = guanosine-3'-phosphate
  modified_base 13: mod_base = OTHER; note = uridine-3'-phosphate
  modified_base 14: mod_base = OTHER; note = uridine-3'-phosphate
  modified_base 15: mod_base = OTHER; note = cytidine-3'-phosphate
  modified_base 16: mod_base = OTHER; note = adenosine-3'-phosphate
  modified_base 17: mod_base = OTHER; note = guanosine-3'-phosphate
  modified_base 18: mod_base = OTHER; note = adenosine-3'-phosphate
  modified_base 19: mod_base = OTHER; note = cytidine-3'-phosphate
  misc_feature 1..19: note = RNA
  misc_feature 20..21: note = DNA
atatctttcaagttcagactt

SEQ ID NO: 2710 - DNA, 21 bp, synthetic construct
  source 1..21: mol_type = other DNA
  modified_base 1: mod_base = OTHER; note = uridine-3'-phosphate
  modified_base 2: mod_base = OTHER; note = adenosine-3'-phosphate
  modified_base 3: mod_base = OTHER; note = adenosine-3'-phosphate
  modified_base 4: mod_base = OTHER; note = uridine-3'-phosphate
  modified_base 5: mod_base = OTHER; note = uridine-3'-phosphate
  modified_base 6: mod_base = OTHER; note = uridine-3'-phosphate
  modified_base 7: mod_base = OTHER; note = adenosine-3'-phosphate
  modified_base 8: mod_base = OTHER; note = uridine-3'-phosphate
  modified_base 9: mod_base = OTHER; note = adenosine-3'-phosphate
  modified_base 10: mod_base = OTHER; note = uridine-3'-phosphate
  modified_base 11: mod_base = OTHER; note = cytidine-3'-phosphate
  modified_base 12: mod_base = OTHER; note = uridine-3'-phosphate
  modified_base 13: mod_base = OTHER; note = uridine-3'-phosphate
  modified_base 14: mod_base = OTHER; note = uridine-3'-phosphate
  modified_base 15: mod_base = OTHER; note = cytidine-3'-phosphate
  modified_base 16: mod_base = OTHER; note = adenosine-3'-phosphate
  modified_base 17: mod_base = OTHER; note = adenosine-3'-phosphate
  modified_base 18: mod_base = OTHER; note = guanosine-3'-phosphate
  modified_base 19: mod_base = OTHER; note = uridine-3'-phosphate
  misc_feature 1..19: note = RNA
  misc_feature 20..21: note = DNA
taatttatatctttcaagttt

SEQ ID NO: 2711 - DNA, 21 bp, synthetic construct
  source 1..21: mol_type = other DNA
  modified_base 1: mod_base = OTHER; note = uridine-3'-phosphate
  modified_base 2: mod_base = OTHER; note = guanosine-3'-phosphate
  modified_base 3: mod_base = OTHER; note = guanosine-3'-phosphate
  modified_base 4: mod_base = OTHER; note = guanosine-3'-phosphate
  modified_base 5: mod_base = OTHER; note = uridine-3'-phosphate
  modified_base 6: mod_base = OTHER; note = uridine-3'-phosphate
  modified_base 7: mod_base = OTHER; note = adenosine-3'-phosphate
  modified_base 8: mod_base = OTHER; note = adenosine-3'-phosphate
  modified_base 9: mod_base = OTHER; note = cytidine-3'-phosphate
  modified_base 10: mod_base = OTHER; note = adenosine-3'-phosphate
  modified_base 11: mod_base = OTHER; note = uridine-3'-phosphate
  modified_base 12: mod_base = OTHER; note = adenosine-3'-phosphate
  modified_base 13: mod_base = OTHER; note = adenosine-3'-phosphate
  modified_base 14: mod_base = OTHER; note = uridine-3'-phosphate
  modified_base 15: mod_base = OTHER; note = uridine-3'-phosphate
  modified_base 16: mod_base = OTHER; note = uridine-3'-phosphate
  modified_base 17: mod_base = OTHER; note = adenosine-3'-phosphate
  modified_base 18: mod_base = OTHER; note = uridine-3'-phosphate
  modified_base 19: mod_base = OTHER; note = adenosine-3'-phosphate
  misc_feature 1..19: note = RNA
  misc_feature 20..21: note = DNA
tgggttaacataatttatatt

SEQ ID NO: 2712 - DNA, 21 bp, synthetic construct
  source 1..21: mol_type = other DNA
  modified_base 1: mod_base = OTHER; note = adenosine-3'-phosphate
  modified_base 2: mod_base = OTHER; note = uridine-3'-phosphate
  modified_base 3: mod_base = OTHER; note = uridine-3'-phosphate
  modified_base 4: mod_base = OTHER; note = uridine-3'-phosphate
  modified_base 5: mod_base = OTHER; note = guanosine-3'-phosphate
  modified_base 6: mod_base = OTHER; note = adenosine-3'-phosphate
  modified_base 7: mod_base = OTHER; note = uridine-3'-phosphate
  modified_base 8: mod_base = OTHER; note = guanosine-3'-phosphate
  modified_base 9: mod_base = OTHER; note = adenosine-3'-phosphate
  modified_base 10: mod_base = OTHER; note = cytidine-3'-phosphate
  modified_base 11: mod_base = OTHER; note = uridine-3'-phosphate
  modified_base 12: mod_base = OTHER; note = guanosine-3'-phosphate
  modified_base 13: mod_base = OTHER; note = guanosine-3'-phosphate
  modified_base 14: mod_base = OTHER; note = guanosine-3'-phosphate
  modified_base 15: mod_base = OTHER; note = uridine-3'-phosphate
  modified_base 16: mod_base = OTHER; note = uridine-3'-phosphate
  modified_base 17: mod_base = OTHER; note = adenosine-3'-phosphate
  modified_base 18: mod_base = OTHER; note = adenosine-3'-phosphate
  modified_base 19: mod_base = OTHER; note = cytidine-3'-phosphate
  misc_feature 1..19: note = RNA
  misc_feature 20..21: note = DNA
atttgatgactgggttaactt

SEQ ID NO: 2713 - DNA, 21 bp, synthetic construct
  source 1..21: mol_type = other DNA
  modified_base 1: mod_base = OTHER; note = uridine-3'-phosphate
  modified_base 2: mod_base = OTHER; note = cytidine-3'-phosphate
  modified_base 3: mod_base = OTHER; note = uridine-3'-phosphate
  modified_base 4: mod_base = OTHER; note = guanosine-3'-phosphate
  modified_base 5: mod_base = OTHER; note = adenosine-3'-phosphate
  modified_base 6: mod_base = OTHER; note = uridine-3'-phosphate
  modified_base 7: mod_base = OTHER; note = adenosine-3'-phosphate
  modified_base 8: mod_base = OTHER; note = guanosine-3'-phosphate
  modified_base 9: mod_base = OTHER; note = cytidine-3'-phosphate
  modified_base 10: mod_base = OTHER; note = cytidine-3'-phosphate
  modified_base 11: mod_base = OTHER; note = adenosine-3'-phosphate
  modified_base 12: mod_base = OTHER; note = uridine-3'-phosphate
  modified_base 13: mod_base = OTHER; note = uridine-3'-phosphate
  modified_base 14: mod_base = OTHER; note = uridine-3'-phosphate
  modified_base 15: mod_base = OTHER; note = guanosine-3'-phosphate
  modified_base 16: mod_base = OTHER; note = adenosine-3'-phosphate
  modified_base 17: mod_base = OTHER; note = uridine-3'-phosphate
  modified_base 18: mod_base = OTHER; note = guanosine-3'-phosphate
  modified_base 19: mod_base = OTHER; note = adenosine-3'-phosphate
  misc_feature 1..19: note = RNA
  misc_feature 20..21: note = DNA
tctgatagccatttgatgatt

SEQ ID NO: 2714 - DNA, 21 bp, synthetic construct
  source 1..21: mol_type = other DNA
  modified_base 1: mod_base = OTHER; note = uridine-3'-phosphate
  modified_base 2: mod_base = OTHER; note = adenosine-3'-phosphate
  modified_base 3: mod_base = OTHER; note = cytidine-3'-phosphate
  modified_base 4: mod_base = OTHER; note = cytidine-3'-phosphate
  modified_base 5: mod_base = OTHER; note = uridine-3'-phosphate
  modified_base 6: mod_base = OTHER; note = cytidine-3'-phosphate
  modified_base 7: mod_base = OTHER; note = uridine-3'-phosphate
  modified_base 8: mod_base = OTHER; note = guanosine-3'-phosphate
  modified_base 9: mod_base = OTHER; note = cytidine-3'-phosphate
  modified_base 10: mod_base = OTHER; note = uridine-3'-phosphate
  modified_base 11: mod_base = OTHER; note = cytidine-3'-phosphate
  modified_base 12: mod_base = OTHER; note = uridine-3'-phosphate
  modified_base 13: mod_base = OTHER; note = uridine-3'-phosphate
  modified_base 14: mod_base = OTHER; note = cytidine-3'-phosphate
  modified_base 15: mod_base = OTHER; note = uridine-3'-phosphate
  modified_base 16: mod_base = OTHER; note = guanosine-3'-phosphate
  modified_base 17: mod_base = OTHER; note = adenosine-3'-phosphate
  modified_base 18: mod_base = OTHER; note = uridine-3'-phosphate
  modified_base 19: mod_base = OTHER; note = adenosine-3'-phosphate
  misc_feature 1..19: note = RNA
  misc_feature 20..21: note = DNA
tacctctgctcttctgatatt

SEQ ID NO: 2715 - DNA, 21 bp, synthetic construct
  source 1..21: mol_type = other DNA
  modified_base 1: mod_base = OTHER; note = adenosine-3'-phosphate
  modified_base 2: mod_base = OTHER; note = adenosine-3'-phosphate
  modified_base 3: mod_base = OTHER; note = guanosine-3'-phosphate
  modified_base 4: mod_base = OTHER; note = cytidine-3'-phosphate
  modified_base 5: mod_base = OTHER; note = cytidine-3'-phosphate
  modified_base 6: mod_base = OTHER; note = adenosine-3'-phosphate
  modified_base 7: mod_base = OTHER; note = cytidine-3'-phosphate
  modified_base 8: mod_base = OTHER; note = cytidine-3'-phosphate
  modified_base 9: mod_base = OTHER; note = uridine-3'-phosphate
  modified_base 10: mod_base = OTHER; note = cytidine-3'-phosphate
  modified_base 11: mod_base = OTHER; note = cytidine-3'-phosphate
  modified_base 12: mod_base = OTHER; note = adenosine-3'-phosphate
  modified_base 13: mod_base = OTHER; note = uridine-3'-phosphate
  modified_base 14: mod_base = OTHER; note = adenosine-3'-phosphate
  modified_base 15: mod_base = OTHER; note = cytidine-3'-phosphate
  modified_base 16: mod_base = OTHER; note = cytidine-3'-phosphate
  modified_base 17: mod_base = OTHER; note = uridine-3'-phosphate
  modified_base 18: mod_base = OTHER; note = cytidine-3'-phosphate
  modified_base 19: mod_base = OTHER; note = uridine-3'-phosphate
  misc_feature 1..19: note = RNA
  misc_feature 20..21: note = DNA
aagccacctccatacctcttt

SEQ ID NO: 2716 - DNA, 21 bp, synthetic construct
  source 1..21: mol_type = other DNA
  modified_base 1: mod_base = OTHER; note = guanosine-3'-phosphate
  modified_base 2: mod_base = OTHER; note = uridine-3'-phosphate
  modified_base 3: mod_base = OTHER; note = uridine-3'-phosphate
  modified_base 4: mod_base = OTHER; note = guanosine-3'-phosphate
  modified_base 5: mod_base = OTHER; note = adenosine-3'-phosphate
  modified_base 6: mod_base = OTHER; note = adenosine-3'-phosphate
  modified_base 7: mod_base = OTHER; note = uridine-3'-phosphate
  modified_base 8: mod_base = OTHER; note = adenosine-3'-phosphate
  modified_base 9: mod_base = OTHER; note = adenosine-3'-phosphate
  modified_base 10: mod_base = OTHER; note = adenosine-3'-phosphate
  modified_base 11: mod_base = OTHER; note = adenosine-3'-phosphate
  modified_base 12: mod_base = OTHER; note = guanosine-3'-phosphate
  modified_base 13: mod_base = OTHER; note = cytidine-3'-phosphate
  modified_base 14: mod_base = OTHER; note = cytidine-3'-phosphate
  modified_base 15: mod_base = OTHER; note = adenosine-3'-phosphate
  modified_base 16: mod_base = OTHER; note = cytidine-3'-phosphate
  modified_base 17: mod_base = OTHER; note = cytidine-3'-phosphate
  modified_base 18: mod_base = OTHER; note = uridine-3'-phosphate
  modified_base 19: mod_base = OTHER; note = cytidine-3'-phosphate
  misc_feature 1..19: note = RNA
  misc_feature 20..21: note = DNA
gttgaataaaagccacctctt

SEQ ID NO: 2717 - DNA, 21 bp, synthetic construct
  source 1..21: mol_type = other DNA
  modified_base 1: mod_base = OTHER; note = uridine-3'-phosphate
  modified_base 2: mod_base = OTHER; note = uridine-3'-phosphate
  modified_base 3: mod_base = OTHER; note = guanosine-3'-phosphate
  modified_base 4: mod_base = OTHER; note = uridine-3'-phosphate
  modified_base 5: mod_base = OTHER; note = guanosine-3'-phosphate
  modified_base 6: mod_base = OTHER; note = uridine-3'-phosphate
  modified_base 7: mod_base = OTHER; note = cytidine-3'-phosphate
  modified_base 8: mod_base = OTHER; note = cytidine-3'-phosphate
  modified_base 9: mod_base = OTHER; note = uridine-3'-phosphate
  modified_base 10: mod_base = OTHER; note = guanosine-3'-phosphate
  modified_base 11: mod_base = OTHER; note = guanosine-3'-phosphate
  modified_base 12: mod_base = OTHER; note = guanosine-3'-phosphate
  modified_base 13: mod_base = OTHER; note = uridine-3'-phosphate
  modified_base 14: mod_base = OTHER; note = uridine-3'-phosphate
  modified_base 15: mod_base = OTHER; note = guanosine-3'-phosphate
  modified_base 16: mod_base = OTHER; note = adenosine-3'-phosphate
  modified_base 17: mod_base = OTHER; note = adenosine-3'-phosphate
  modified_base 18: mod_base = OTHER; note = uridine-3'-phosphate
  modified_base 19: mod_base = OTHER; note = adenosine-3'-phosphate
  misc_feature 1..19: note = RNA
  misc_feature 20..21: note = DNA
ttgtgtcctgggttgaatatt

SEQ ID NO: 2718 - DNA, 21 bp, synthetic construct
  source 1..21: mol_type = other DNA
  modified_base 1: mod_base = OTHER; note = adenosine-3'-phosphate
  modified_base 2: mod_base = OTHER; note = uridine-3'-phosphate
  modified_base 3: mod_base = OTHER; note = guanosine-3'-phosphate
  modified_base 4: mod_base = OTHER; note = guanosine-3'-phosphate
  modified_base 5: mod_base = OTHER; note = cytidine-3'-phosphate
  modified_base 6: mod_base = OTHER; note = adenosine-3'-phosphate
  modified_base 7: mod_base = OTHER; note = uridine-3'-phosphate
  modified_base 8: mod_base = OTHER; note = uridine-3'-phosphate
  modified_base 9: mod_base = OTHER; note = guanosine-3'-phosphate
  modified_base 10: mod_base = OTHER; note = adenosine-3'-phosphate
  modified_base 11: mod_base = OTHER; note = uridine-3'-phosphate
  modified_base 12: mod_base = OTHER; note = uridine-3'-phosphate
  modified_base 13: mod_base = OTHER; note = guanosine-3'-phosphate
  modified_base 14: mod_base = OTHER; note = uridine-3'-phosphate
  modified_base 15: mod_base = OTHER; note = guanosine-3'-phosphate
  modified_base 16: mod_base = OTHER; note = uridine-3'-phosphate
  modified_base 17: mod_base = OTHER; note = cytidine-3'-phosphate
  modified_base 18: mod_base = OTHER; note = cytidine-3'-phosphate
  modified_base 19: mod_base = OTHER; note = uridine-3'-phosphate
  misc_feature 1..19: note = RNA
  misc_feature 20..21: note = DNA
atggcattgattgtgtccttt

SEQ ID NO: 2719 - DNA, 21 bp, synthetic construct
  source 1..21: mol_type = other DNA
  modified_base 1: mod_base = OTHER; note = cytidine-3'-phosphate
  modified_base 2: mod_base = OTHER; note = cytidine-3'-phosphate
  modified_base 3: mod_base = OTHER; note = cytidine-3'-phosphate
  modified_base 4: mod_base = OTHER; note = uridine-3'-phosphate
  modified_base 5: mod_base = OTHER; note = cytidine-3'-phosphate
  modified_base 6: mod_base = OTHER; note = adenosine-3'-phosphate
  modified_base 7: mod_base = OTHER; note = adenosine-3'-phosphate
  modified_base 8: mod_base = OTHER; note = uridine-3'-phosphate
  modified_base 9: mod_base = OTHER; note = guanosine-3'-phosphate
  modified_base 10: mod_base = OTHER; note = guanosine-3'-phosphate
  modified_base 11: mod_base = OTHER; note = cytidine-3'-phosphate
  modified_base 12: mod_base = OTHER; note = adenosine-3'-phosphate
  modified_base 13: mod_base = OTHER; note = uridine-3'-phosphate
  modified_base 14: mod_base = OTHER; note = uridine-3'-phosphate
  modified_base 15: mod_base = OTHER; note = guanosine-3'-phosphate
  modified_base 16: mod_base = OTHER; note = adenosine-3'-phosphate
  modified_base 17: mod_base = OTHER; note = uridine-3'-phosphate
  modified_base 18: mod_base = OTHER; note = uridine-3'-phosphate
  modified_base 19: mod_base = OTHER; note = guanosine-3'-phosphate
  misc_feature 1..19: note = RNA
  misc_feature 20..21: note = DNA
ccctcaatggcattgattgtt

SEQ ID NO: 2720 - DNA, 21 bp, synthetic construct
  source 1..21: mol_type = other DNA
  modified_base 1: mod_base = OTHER; note = uridine-3'-phosphate
  modified_base 2: mod_base = OTHER; note = uridine-3'-phosphate
  modified_base 3: mod_base = OTHER; note = cytidine-3'-phosphate
  modified_base 4: mod_base = OTHER; note = cytidine-3'-phosphate
  modified_base 5: mod_base = OTHER; note = guanosine-3'-phosphate
  modified_base 6: mod_base = OTHER; note = uridine-3'-phosphate
  modified_base 7: mod_base = OTHER; note = cytidine-3'-phosphate
  modified_base 8: mod_base = OTHER; note = adenosine-3'-phosphate
  modified_base 9: mod_base = OTHER; note = guanosine-3'-phosphate
  modified_base 10: mod_base = OTHER; note = guanosine-3'-phosphate
  modified_base 11: mod_base = OTHER; note = cytidine-3'-phosphate
  modified_base 12: mod_base = OTHER; note = cytidine-3'-phosphate
  modified_base 13: mod_base = OTHER; note = cytidine-3'-phosphate
  modified_base 14: mod_base = OTHER; note = uridine-3'-phosphate
  modified_base 15: mod_base = OTHER; note = cytidine-3'-phosphate
  modified_base 16: mod_base = OTHER; note = adenosine-3'-phosphate
  modified_base 17: mod_base = OTHER; note = adenosine-3'-phosphate
  modified_base 18: mod_base = OTHER; note = uridine-3'-phosphate
  modified_base 19: mod_base = OTHER; note = guanosine-3'-phosphate
  misc_feature 1..19: note = RNA
  misc_feature 20..21: note = DNA
ttccgtcaggccctcaatgtt

SEQ ID NO: 2721 - DNA, 21 bp, synthetic construct
  source 1..21: mol_type = other DNA
  modified_base 1: mod_base = OTHER; note = cytidine-3'-phosphate
  modified_base 2: mod_base = OTHER; note = cytidine-3'-phosphate
  modified_base 3: mod_base = OTHER; note = adenosine-3'-phosphate
  modified_base 4: mod_base = OTHER; note = guanosine-3'-phosphate
  modified_base 5: mod_base = OTHER; note = guanosine-3'-phosphate
  modified_base 6: mod_base = OTHER; note = adenosine-3'-phosphate
  modified_base 7: mod_base = OTHER; note = guanosine-3'-phosphate
  modified_base 8: mod_base = OTHER; note = uridine-3'-phosphate
  modified_base 9: mod_base = OTHER; note = guanosine-3'-phosphate
  modified_base 10: mod_base = OTHER; note = adenosine-3'-phosphate
  modified_base 11: mod_base = OTHER; note = adenosine-3'-phosphate
  modified_base 12: mod_base = OTHER; note = uridine-3'-phosphate
  modified_base 13: mod_base = OTHER; note = adenosine-3'-phosphate
  modified_base 14: mod_base = OTHER; note = uridine-3'-phosphate
  modified_base 15: mod_base = OTHER; note = uridine-3'-phosphate
  modified_base 16: mod_base = OTHER; note = cytidine-3'-phosphate
  modified_base 17: mod_base = OTHER; note = cytidine-3'-phosphate
  modified_base 18: mod_base = OTHER; note = guanosine-3'-phosphate
  modified_base 19: mod_base = OTHER; note = uridine-3'-phosphate
  misc_feature 1..19: note = RNA
  misc_feature 20..21: note = DNA
ccaggagtgaatattccgttt

SEQ ID NO: 2722 - DNA, 21 bp, synthetic construct
  source 1..21: mol_type = other DNA
  modified_base 1: mod_base = OTHER; note = uridine-3'-phosphate
  modified_base 2: mod_base = OTHER; note = uridine-3'-phosphate
  modified_base 3: mod_base = OTHER; note = guanosine-3'-phosphate
  modified_base 4: mod_base = OTHER; note = uridine-3'-phosphate
  modified_base 5: mod_base = OTHER; note = uridine-3'-phosphate
  modified_base 6: mod_base = OTHER; note = uridine-3'-phosphate
  modified_base 7: mod_base = OTHER; note = adenosine-3'-phosphate
  modified_base 8: mod_base = OTHER; note = adenosine-3'-phosphate
  modified_base 9: mod_base = OTHER; note = cytidine-3'-phosphate
  modified_base 10: mod_base = OTHER; note = cytidine-3'-phosphate
  modified_base 11: mod_base = OTHER; note = adenosine-3'-phosphate
  modified_base 12: mod_base = OTHER; note = guanosine-3'-phosphate
  modified_base 13: mod_base = OTHER; note = guanosine-3'-phosphate
  modified_base 14: mod_base = OTHER; note = adenosine-3'-phosphate
  modified_base 15: mod_base = OTHER; note = guanosine-3'-phosphate
  modified_base 16: mod_base = OTHER; note = uridine-3'-phosphate
  modified_base 17: mod_base = OTHER; note = guanosine-3'-phosphate
  modified_base 18: mod_base = OTHER; note = adenosine-3'-phosphate
  modified_base 19: mod_base = OTHER; note = adenosine-3'-phosphate
  misc_feature 1..19: note = RNA
  misc_feature 20..21: note = DNA
ttgtttaaccaggagtgaatt

SEQ ID NO: 2723 - DNA, 21 bp, synthetic construct
  source 1..21: mol_type = other DNA
  modified_base 1: mod_base = OTHER; note = cytidine-3'-phosphate
  modified_base 2: mod_base = OTHER; note = adenosine-3'-phosphate
  modified_base 3: mod_base = OTHER; note = adenosine-3'-phosphate
  modified_base 4: mod_base = OTHER; note = guanosine-3'-phosphate
  modified_base 5: mod_base = OTHER; note = cytidine-3'-phosphate
  modified_base 6: mod_base = OTHER; note = guanosine-3'-phosphate
  modified_base 7: mod_base = OTHER; note = guanosine-3'-phosphate
  modified_base 8: mod_base = OTHER; note = adenosine-3'-phosphate
  modified_base 9: mod_base = OTHER; note = guanosine-3'-phosphate
  modified_base 10: mod_base = OTHER; note = uridine-3'-phosphate
  modified_base 11: mod_base = OTHER; note = uridine-3'-phosphate
  modified_base 12: mod_base = OTHER; note = guanosine-3'-phosphate
  modified_base 13: mod_base = OTHER; note = uridine-3'-phosphate
  modified_base 14: mod_base = OTHER; note = uridine-3'-phosphate
  modified_base 15: mod_base = OTHER; note = uridine-3'-phosphate
  modified_base 16: mod_base = OTHER; note = adenosine-3'-phosphate
  modified_base 17: mod_base = OTHER; note = adenosine-3'-phosphate
  modified_base 18: mod_base = OTHER; note = cytidine-3'-phosphate
  modified_base 19: mod_base = OTHER; note = cytidine-3'-phosphate
  misc_feature 1..19: note = RNA
  misc_feature 20..21: note = DNA
caagcggagttgtttaacctt

SEQ ID NO: 2724 - DNA, 21 bp, synthetic construct
  source 1..21: mol_type = other DNA
  modified_base 1: mod_base = OTHER; note = guanosine-3'-phosphate
  modified_base 2: mod_base = OTHER; note = adenosine-3'-phosphate
  modified_base 3: mod_base = OTHER; note = uridine-3'-phosphate
  modified_base 4: mod_base = OTHER; note = guanosine-3'-phosphate
  modified_base 5: mod_base = OTHER; note = uridine-3'-phosphate
  modified_base 6: mod_base = OTHER; note = cytidine-3'-phosphate
  modified_base 7: mod_base = OTHER; note = cytidine-3'-phosphate
  modified_base 8: mod_base = OTHER; note = adenosine-3'-phosphate
  modified_base 9: mod_base = OTHER; note = uridine-3'-phosphate
  modified_base 10: mod_base = OTHER; note = adenosine-3'-phosphate
  modified_base 11: mod_base = OTHER; note = cytidine-3'-phosphate
  modified_base 12: mod_base = OTHER; note = uridine-3'-phosphate
  modified_base 13: mod_base = OTHER; note = cytidine-3'-phosphate
  modified_base 14: mod_base = OTHER; note = adenosine-3'-phosphate
  modified_base 15: mod_base = OTHER; note = adenosine-3'-phosphate
  modified_base 16: mod_base = OTHER; note = guanosine-3'-phosphate
  modified_base 17: mod_base = OTHER; note = cytidine-3'-phosphate
  modified_base 18: mod_base = OTHER; note = guanosine-3'-phosphate
  modified_base 19: mod_base = OTHER; note = guanosine-3'-phosphate
  misc_feature 1..19: note = RNA
  misc_feature 20..21: note = DNA
gatgtccatactcaagcggtt

SEQ ID NO: 2725 - DNA, 21 bp, synthetic construct
  source 1..21: mol_type = other DNA
  modified_base 1: mod_base = OTHER; note = guanosine-3'-phosphate
  modified_base 2: mod_base = OTHER; note = uridine-3'-phosphate
  modified_base 3: mod_base = OTHER; note = adenosine-3'-phosphate
  modified_base 4: mod_base = OTHER; note = adenosine-3'-phosphate
  modified_base 5: mod_base = OTHER; note = guanosine-3'-phosphate
  modified_base 6: mod_base = OTHER; note = adenosine-3'-phosphate
  modified_base 7: mod_base = OTHER; note = adenosine-3'-phosphate
  modified_base 8: mod_base = OTHER; note = adenosine-3'-phosphate
  modified_base 9: mod_base = OTHER; note = cytidine-3'-phosphate
  modified_base 10: mod_base = OTHER; note = adenosine-3'-phosphate
  modified_base 11: mod_base = OTHER; note = uridine-3'-phosphate
  modified_base 12: mod_base = OTHER; note = cytidine-3'-phosphate
  modified_base 13: mod_base = OTHER; note = guanosine-3'-phosphate
  modified_base 14: mod_base = OTHER; note = adenosine-3'-phosphate
  modified_base 15: mod_base = OTHER; note = uridine-3'-phosphate
  modified_base 16: mod_base = OTHER; note = guanosine-3'-phosphate
  modified_base 17: mod_base = OTHER; note = uridine-3'-phosphate
  modified_base 18: mod_base = OTHER; note = cytidine-3'-phosphate
  modified_base 19: mod_base = OTHER; note = cytidine-3'-phosphate
  misc_feature 1..19: note = RNA
  misc_feature 20..21: note = DNA
gtaagaaacatcgatgtcctt

SEQ ID NO: 2726 - DNA, 21 bp, synthetic construct
  source 1..21: mol_type = other DNA
  modified_base 1: mod_base = OTHER; note = adenosine-3'-phosphate
  modified_base 2: mod_base = OTHER; note = uridine-3'-phosphate
  modified_base 3: mod_base = OTHER; note = guanosine-3'-phosphate
  modified_base 4: mod_base = OTHER; note = cytidine-3'-phosphate
  modified_base 5: mod_base = OTHER; note = uridine-3'-phosphate
  modified_base 6: mod_base = OTHER; note = uridine-3'-phosphate
  modified_base 7: mod_base = OTHER; note = guanosine-3'-phosphate
  modified_base 8: mod_base = OTHER; note = uridine-3'-phosphate
  modified_base 9: mod_base = OTHER; note = adenosine-3'-phosphate
  modified_base 10: mod_base = OTHER; note = adenosine-3'-phosphate
  modified_base 11: mod_base = OTHER; note = guanosine-3'-phosphate
  modified_base 12: mod_base = OTHER; note = adenosine-3'-phosphate
  modified_base 13: mod_base = OTHER; note = adenosine-3'-phosphate
  modified_base 14: mod_base = OTHER; note = adenosine-3'-phosphate
  modified_base 15: mod_base = OTHER; note = cytidine-3'-phosphate
  modified_base 16: mod_base = OTHER; note = adenosine-3'-phosphate
  modified_base 17: mod_base = OTHER; note = uridine-3'-phosphate
  modified_base 18: mod_base = OTHER; note = cytidine-3'-phosphate
  modified_base 19: mod_base = OTHER; note = guanosine-3'-phosphate
  misc_feature 1..19: note = RNA
  misc_feature 20..21: note = DNA
atgcttgtaagaaacatcgtt

SEQ ID NO: 2727 - DNA, 21 bp, synthetic construct
  source 1..21: mol_type = other DNA
  modified_base 1: mod_base = OTHER; note = uridine-3'-phosphate
  modified_base 2: mod_base = OTHER; note = adenosine-3'-phosphate
  modified_base 3: mod_base = OTHER; note = adenosine-3'-phosphate
  modified_base 4: mod_base = OTHER; note = guanosine-3'-phosphate
  modified_base 5: mod_base = OTHER; note = guanosine-3'-phosphate
  modified_base 6: mod_base = OTHER; note = cytidine-3'-phosphate
  modified_base 7: mod_base = OTHER; note = adenosine-3'-phosphate
  modified_base 8: mod_base = OTHER; note = cytidine-3'-phosphate
  modified_base 9: mod_base = OTHER; note = cytidine-3'-phosphate
  modified_base 10: mod_base = OTHER; note = uridine-3'-phosphate
  modified_base 11: mod_base = OTHER; note = uridine-3'-phosphate
  modified_base 12: mod_base = OTHER; note = uridine-3'-phosphate
  modified_base 13: mod_base = OTHER; note = adenosine-3'-phosphate
  modified_base 14: mod_base = OTHER; note = uridine-3'-phosphate
  modified_base 15: mod_base = OTHER; note = guanosine-3'-phosphate
  modified_base 16: mod_base = OTHER; note = cytidine-3'-phosphate
  modified_base 17: mod_base = OTHER; note = uridine-3'-phosphate
  modified_base 18: mod_base = OTHER; note = uridine-3'-phosphate
  modified_base 19: mod_base = OTHER; note = guanosine-3'-phosphate
  misc_feature 1..19: note = RNA
  misc_feature 20..21: note = DNA
taaggcacctttatgcttgtt

SEQ ID NO: 2728 - DNA, 21 bp, synthetic construct
  source 1..21: mol_type = other DNA
  modified_base 1: mod_base = OTHER; note = uridine-3'-phosphate
  modified_base 2: mod_base = OTHER; note = uridine-3'-phosphate
  modified_base 3: mod_base = OTHER; note = adenosine-3'-phosphate
  modified_base 4: mod_base = OTHER; note = uridine-3'-phosphate
  modified_base 5: mod_base = OTHER; note = adenosine-3'-phosphate
  modified_base 6: mod_base = OTHER; note = adenosine-3'-phosphate
  modified_base 7: mod_base = OTHER; note = uridine-3'-phosphate
  modified_base 8: mod_base = OTHER; note = uridine-3'-phosphate
  modified_base 9: mod_base = OTHER; note = adenosine-3'-phosphate
  modified_base 10: mod_base = OTHER; note = uridine-3'-phosphate
  modified_base 11: mod_base = OTHER; note = guanosine-3'-phosphate
  modified_base 12: mod_base = OTHER; note = uridine-3'-phosphate
  modified_base 13: mod_base = OTHER; note = adenosine-3'-phosphate
  modified_base 14: mod_base = OTHER; note = adenosine-3'-phosphate
  modified_base 15: mod_base = OTHER; note = guanosine-3'-phosphate
  modified_base 16: mod_base = OTHER; note = guanosine-3'-phosphate
  modified_base 17: mod_base = OTHER; note = cytidine-3'-phosphate
  modified_base 18: mod_base = OTHER; note = adenosine-3'-phosphate
  modified_base 19: mod_base = OTHER; note = cytidine-3'-phosphate
  misc_feature 1..19: note = RNA
  misc_feature 20..21: note = DNA
ttataattatgtaaggcactt

SEQ ID NO: 2729 - DNA, 21 bp, synthetic construct
  source 1..21: mol_type = other DNA
  modified_base 1: mod_base = OTHER; note = uridine-3'-phosphate
  modified_base 2: mod_base = OTHER; note = guanosine-3'-phosphate
  modified_base 3: mod_base = OTHER; note = uridine-3'-phosphate
  modified_base 4: mod_base = OTHER; note = cytidine-3'-phosphate
  modified_base 5: mod_base = OTHER; note = adenosine-3'-phosphate
  modified_base 6: mod_base = OTHER; note = uridine-3'-phosphate
  modified_base 7: mod_base = OTHER; note = uridine-3'-phosphate
  modified_base 8: mod_base = OTHER; note = uridine-3'-phosphate
  modified_base 9: mod_base = OTHER; note = uridine-3'-phosphate
  modified_base 10: mod_base = OTHER; note = adenosine-3'-phosphate
  modified_base 11: mod_base = OTHER; note = uridine-3'-phosphate
  modified_base 12: mod_base = OTHER; note = adenosine-3'-phosphate
  modified_base 13: mod_base = OTHER; note = adenosine-3'-phosphate
  modified_base 14: mod_base = OTHER; note = uridine-3'-phosphate
  modified_base 15: mod_base = OTHER; note = uridine-3'-phosphate
  modified_base 16: mod_base = OTHER; note = adenosine-3'-phosphate
  modified_base 17: mod_base = OTHER; note = uridine-3'-phosphate
  modified_base 18: mod_base = OTHER; note = guanosine-3'-phosphate
  modified_base 19: mod_base = OTHER; note = uridine-3'-phosphate
  misc_feature 1..19: note = RNA
  misc_feature 20..21: note = DNA
tgtcattttataattatgttt

SEQ ID NO: 2730 - DNA, 21 bp, synthetic construct
  source 1..21: mol_type = other DNA
  modified_base 1: mod_base = OTHER; note = adenosine-3'-phosphate
  modified_base 2: mod_base = OTHER; note = adenosine-3'-phosphate
  modified_base 3: mod_base = OTHER; note = uridine-3'-phosphate
  modified_base 4: mod_base = OTHER; note = uridine-3'-phosphate
  modified_base 5: mod_base = OTHER; note = cytidine-3'-phosphate
  modified_base 6: mod_base = OTHER; note = uridine-3'-phosphate
  modified_base 7: mod_base = OTHER; note = uridine-3'-phosphate
  modified_base 8: mod_base = OTHER; note = guanosine-3'-phosphate
  modified_base 9: mod_base = OTHER; note = uridine-3'-phosphate
  modified_base 10: mod_base = OTHER; note = cytidine-3'-phosphate
  modified_base 11: mod_base = OTHER; note = uridine-3'-phosphate
  modified_base 12: mod_base = OTHER; note = guanosine-3'-phosphate
  modified_base 13: mod_base = OTHER; note = uridine-3'-phosphate
  modified_base 14: mod_base = OTHER; note = cytidine-3'-phosphate
  modified_base 15: mod_base = OTHER; note = adenosine-3'-phosphate
  modified_base 16: mod_base = OTHER; note = uridine-3'-phosphate
  modified_base 17: mod_base = OTHER; note = uridine-3'-phosphate
  modified_base 18: mod_base = OTHER; note = uridine-3'-phosphate
  modified_base 19: mod_base = OTHER; note = uridine-3'-phosphate
  misc_feature 1..19: note = RNA
  misc_feature 20..21: note = DNA
aattcttgtctgtcatttttt

SEQ ID NO: 2731 - DNA, 21 bp, synthetic construct
  source 1..21: mol_type = other DNA
  modified_base 1: mod_base = OTHER; note = cytidine-3'-phosphate
  modified_base 2: mod_base = OTHER; note = cytidine-3'-phosphate
  modified_base 3: mod_base = OTHER; note = uridine-3'-phosphate
  modified_base 4: mod_base = OTHER; note = cytidine-3'-phosphate
  modified_base 5: mod_base = OTHER; note = cytidine-3'-phosphate
  modified_base 6: mod_base = OTHER; note = cytidine-3'-phosphate
  modified_base 7: mod_base = OTHER; note = adenosine-3'-phosphate
  modified_base 8: mod_base = OTHER; note = adenosine-3'-phosphate
  modified_base 9: mod_base = OTHER; note = guanosine-3'-phosphate
  modified_base 10: mod_base = OTHER; note = guanosine-3'-phosphate
  modified_base 11: mod_base = OTHER; note = adenosine-3'-phosphate
  modified_base 12: mod_base = OTHER; note = adenosine-3'-phosphate
  modified_base 13: mod_base = OTHER; note = adenosine-3'-phosphate
  modified_base 14: mod_base = OTHER; note = uridine-3'-phosphate
  modified_base 15: mod_base = OTHER; note = uridine-3'-phosphate
  modified_base 16: mod_base = OTHER; note = cytidine-3'-phosphate
  modified_base 17: mod_base = OTHER; note = uridine-3'-phosphate
  modified_base 18: mod_base = OTHER; note = uridine-3'-phosphate
  modified_base 19: mod_base = OTHER; note = guanosine-3'-phosphate
  misc_feature 1..19: note = RNA
  misc_feature 20..21: note = DNA
cctcccaaggaaattcttgtt

SEQ ID NO: 2732 - DNA, 21 bp, synthetic construct
  source 1..21: mol_type = other DNA
  modified_base 1: mod_base = OTHER; note = cytidine-3'-phosphate
  modified_base 2: mod_base = OTHER; note = uridine-3'-phosphate
  modified_base 3: mod_base = OTHER; note = cytidine-3'-phosphate
  modified_base 4: mod_base = OTHER; note = uridine-3'-phosphate
  modified_base 5: mod_base = OTHER; note = adenosine-3'-phosphate
  modified_base 6: mod_base = OTHER; note = cytidine-3'-phosphate
  modified_base 7: mod_base = OTHER; note = uridine-3'-phosphate
  modified_base 8: mod_base = OTHER; note = guanosine-3'-phosphate
  modified_base 9: mod_base = OTHER; note = guanosine-3'-phosphate
  modified_base 10: mod_base = OTHER; note = cytidine-3'-phosphate
  modified_base 11: mod_base = OTHER; note = cytidine-3'-phosphate
  modified_base 12: mod_base = OTHER; note = uridine-3'-phosphate
  modified_base 13: mod_base = OTHER; note = cytidine-3'-phosphate
  modified_base 14: mod_base = OTHER; note = cytidine-3'-phosphate
  modified_base 15: mod_base = OTHER; note = cytidine-3'-phosphate
  modified_base 16: mod_base = OTHER; note = adenosine-3'-phosphate
  modified_base 17: mod_base = OTHER; note = adenosine-3'-phosphate
  modified_base 18: mod_base = OTHER; note = guanosine-3'-phosphate
  modified_base 19: mod_base = OTHER; note = guanosine-3'-phosphate
  misc_feature 1..19: note = RNA
  misc_feature 20..21: note = DNA
ctctactggcctcccaaggtt

SEQ ID NO: 2733 - DNA, 21 bp, synthetic construct
  source 1..21: mol_type = other DNA
  modified_base 1: mod_base = OTHER; note = adenosine-3'-phosphate
  modified_base 2: mod_base = OTHER; note = uridine-3'-phosphate
  modified_base 3: mod_base = OTHER; note = uridine-3'-phosphate
  modified_base 4: mod_base = OTHER; note = guanosine-3'-phosphate
  modified_base 5: mod_base = OTHER; note = adenosine-3'-phosphate
  modified_base 6: mod_base = OTHER; note = guanosine-3'-phosphate
  modified_base 7: mod_base = OTHER; note = adenosine-3'-phosphate
  modified_base 8: mod_base = OTHER; note = adenosine-3'-phosphate
  modified_base 9: mod_base = OTHER; note = guanosine-3'-phosphate
  modified_base 10: mod_base = OTHER; note = cytidine-3'-phosphate
  modified_base 11: mod_base = OTHER; note = adenosine-3'-phosphate
  modified_base 12: mod_base = OTHER; note = cytidine-3'-phosphate
  modified_base 13: mod_base = OTHER; note = cytidine-3'-phosphate
  modified_base 14: mod_base = OTHER; note = uridine-3'-phosphate
  modified_base 15: mod_base = OTHER; note = cytidine-3'-phosphate
  modified_base 16: mod_base = OTHER; note = uridine-3'-phosphate
  modified_base 17: mod_base = OTHER; note = adenosine-3'-phosphate
  modified_base 18: mod_base = OTHER; note = cytidine-3'-phosphate
  modified_base 19: mod_base = OTHER; note = uridine-3'-phosphate
  misc_feature 1..19: note = RNA
  misc_feature 20..21: note = DNA
attgagaagcacctctacttt

SEQ ID NO: 2734 - DNA, 21 bp, synthetic construct
  source 1..21: mol_type = other DNA
  modified_base 1: mod_base = OTHER; note = uridine-3'-phosphate
  modified_base 2: mod_base = OTHER; note = guanosine-3'-phosphate
  modified_base 3: mod_base = OTHER; note = adenosine-3'-phosphate
  modified_base 4: mod_base = OTHER; note = guanosine-3'-phosphate
  modified_base 5: mod_base = OTHER; note = guanosine-3'-phosphate
  modified_base 6: mod_base = OTHER; note = uridine-3'-phosphate
  modified_base 7: mod_base = OTHER; note = cytidine-3'-phosphate
  modified_base 8: mod_base = OTHER; note = adenosine-3'-phosphate
  modified_base 9: mod_base = OTHER; note = uridine-3'-phosphate
  modified_base 10: mod_base = OTHER; note = cytidine-3'-phosphate
  modified_base 11: mod_base = OTHER; note = adenosine-3'-phosphate
  modified_base 12: mod_base = OTHER; note = uridine-3'-phosphate
  modified_base 13: mod_base = OTHER; note = uridine-3'-phosphate
  modified_base 14: mod_base = OTHER; note = guanosine-3'-phosphate
  modified_base 15: mod_base = OTHER; note = adenosine-3'-phosphate
  modified_base 16: mod_base = OTHER; note = guanosine-3'-phosphate
  modified_base 17: mod_base = OTHER; note = adenosine-3'-phosphate
  modified_base 18: mod_base = OTHER; note = adenosine-3'-phosphate
  modified_base 19: mod_base = OTHER; note = guanosine-3'-phosphate
  misc_feature 1..19: note = RNA
  misc_feature 20..21: note = DNA
tgaggtcatcattgagaagtt

SEQ ID NO: 2735 - DNA, 21 bp, synthetic construct
  source 1..21: mol_type = other DNA
  modified_base 1: mod_base = OTHER; note = uridine-3'-phosphate
  modified_base 2: mod_base = OTHER; note = guanosine-3'-phosphate
  modified_base 3: mod_base = OTHER; note = uridine-3'-phosphate
  modified_base 4: mod_base = OTHER; note = adenosine-3'-phosphate
  modified_base 5: mod_base = OTHER; note = cytidine-3'-phosphate
  modified_base 6: mod_base = OTHER; note = uridine-3'-phosphate
  modified_base 7: mod_base = OTHER; note = guanosine-3'-phosphate
  modified_base 8: mod_base = OTHER; note = adenosine-3'-phosphate
  modified_base 9: mod_base = OTHER; note = cytidine-3'-phosphate
  modified_base 10: mod_base = OTHER; note = adenosine-3'-phosphate
  modified_base 11: mod_base = OTHER; note = adenosine-3'-phosphate
  modified_base 12: mod_base = OTHER; note = uridine-3'-phosphate
  modified_base 13: mod_base = OTHER; note = guanosine-3'-phosphate
  modified_base 14: mod_base = OTHER; note = adenosine-3'-phosphate
  modified_base 15: mod_base = OTHER; note = guanosine-3'-phosphate
  modified_base 16: mod_base = OTHER; note = guanosine-3'-phosphate
  modified_base 17: mod_base = OTHER; note = uridine-3'-phosphate
  modified_base 18: mod_base = OTHER; note = cytidine-3'-phosphate
  modified_base 19: mod_base = OTHER; note = adenosine-3'-phosphate
  misc_feature 1..19: note = RNA
  misc_feature 20..21: note = DNA
tgtactgacaatgaggtcatt

SEQ ID NO: 2736 - DNA, 21 bp, synthetic construct
  source 1..21: mol_type = other DNA
  modified_base 1: mod_base = OTHER; note = uridine-3'-phosphate
  modified_base 2: mod_base = OTHER; note = guanosine-3'-phosphate
  modified_base 3: mod_base = OTHER; note = cytidine-3'-phosphate
  modified_base 4: mod_base = OTHER; note = cytidine-3'-phosphate
  modified_base 5: mod_base = OTHER; note = adenosine-3'-phosphate
  modified_base 6: mod_base = OTHER; note = adenosine-3'-phosphate
  modified_base 7: mod_base = OTHER; note = adenosine-3'-phosphate
  modified_base 8: mod_base = OTHER; note = uridine-3'-phosphate
  modified_base 9: mod_base = OTHER; note = cytidine-3'-phosphate
  modified_base 10: mod_base = OTHER; note = cytidine-3'-phosphate
  modified_base 11: mod_base = OTHER; note = uridine-3'-phosphate
  modified_base 12: mod_base = OTHER; note = guanosine-3'-phosphate
  modified_base 13: mod_base = OTHER; note = uridine-3'-phosphate
  modified_base 14: mod_base = OTHER; note = adenosine-3'-phosphate
  modified_base 15: mod_base = OTHER; note = cytidine-3'-phosphate
  modified_base 16: mod_base = OTHER; note = uridine-3'-phosphate
  modified_base 17: mod_base = OTHER; note = guanosine-3'-phosphate
  modified_base 18: mod_base = OTHER; note = adenosine-3'-phosphate
  modified_base 19: mod_base = OTHER; note = cytidine-3'-phosphate
  misc_feature 1..19: note = RNA
  misc_feature 20..21: note = DNA
tgccaaatcctgtactgactt

SEQ ID NO: 2737 - DNA, 21 bp, synthetic construct
  source 1..21: mol_type = other DNA
  modified_base 1: mod_base = OTHER; note = cytidine-3'-phosphate
  modified_base 2: mod_base = OTHER; note = adenosine-3'-phosphate
  modified_base 3: mod_base = OTHER; note = adenosine-3'-phosphate
  modified_base 4: mod_base = OTHER; note = guanosine-3'-phosphate
  modified_base 5: mod_base = OTHER; note = cytidine-3'-phosphate
  modified_base 6: mod_base = OTHER; note = cytidine-3'-phosphate
  modified_base 7: mod_base = OTHER; note = adenosine-3'-phosphate
  modified_base 8: mod_base = OTHER; note = cytidine-3'-phosphate
  modified_base 9: mod_base = OTHER; note = uridine-3'-phosphate
  modified_base 10: mod_base = OTHER; note = guanosine-3'-phosphate
  modified_base 11: mod_base = OTHER; note = cytidine-3'-phosphate
  modified_base 12: mod_base = OTHER; note = cytidine-3'-phosphate
  modified_base 13: mod_base = OTHER; note = adenosine-3'-phosphate
  modified_base 14: mod_base = OTHER; note = adenosine-3'-phosphate
  modified_base 15: mod_base = OTHER; note = adenosine-3'-phosphate
  modified_base 16: mod_base = OTHER; note = uridine-3'-phosphate
  modified_base 17: mod_base = OTHER; note = cytidine-3'-phosphate
  modified_base 18: mod_base = OTHER; note = cytidine-3'-phosphate
  modified_base 19: mod_base = OTHER; note = uridine-3'-phosphate
  misc_feature 1..19: note = RNA
  misc_feature 20..21: note = DNA
caagccactgccaaatccttt

SEQ ID NO: 2738 - DNA, 21 bp, synthetic construct
  source 1..21: mol_type = other DNA
  modified_base 1: mod_base = OTHER; note = adenosine-3'-phosphate
  modified_base 2: mod_base = OTHER; note = uridine-3'-phosphate
  modified_base 3: mod_base = OTHER; note = guanosine-3'-phosphate
  modified_base 4: mod_base = OTHER; note = uridine-3'-phosphate
  modified_base 5: mod_base = OTHER; note = adenosine-3'-phosphate
  modified_base 6: mod_base = OTHER; note = cytidine-3'-phosphate
  modified_base 7: mod_base = OTHER; note = uridine-3'-phosphate
  modified_base 8: mod_base = OTHER; note = guanosine-3'-phosphate
  modified_base 9: mod_base = OTHER; note = uridine-3'-phosphate
  modified_base 10: mod_base = OTHER; note = adenosine-3'-phosphate
  modified_base 11: mod_base = OTHER; note = guanosine-3'-phosphate
  modified_base 12: mod_base = OTHER; note = cytidine-3'-phosphate
  modified_base 13: mod_base = OTHER; note = cytidine-3'-phosphate
  modified_base 14: mod_base = OTHER; note = adenosine-3'-phosphate
  modified_base 15: mod_base = OTHER; note = adenosine-3'-phosphate
  modified_base 16: mod_base = OTHER; note = guanosine-3'-phosphate
  modified_base 17: mod_base = OTHER; note = cytidine-3'-phosphate
  modified_base 18: mod_base = OTHER; note = cytidine-3'-phosphate
  modified_base 19: mod_base = OTHER; note = adenosine-3'-phosphate
  misc_feature 1..19: note = RNA
  misc_feature 20..21: note = DNA
atgtactgtagccaagccatt

SEQ ID NO: 2739 - DNA, 21 bp, synthetic construct
  source 1..21: mol_type = other DNA
  modified_base 1: mod_base = OTHER; note = uridine-3'-phosphate
  modified_base 2: mod_base = OTHER; note = uridine-3'-phosphate
  modified_base 3: mod_base = OTHER; note = guanosine-3'-phosphate
  modified_base 4: mod_base = OTHER; note = uridine-3'-phosphate
  modified_base 5: mod_base = OTHER; note = uridine-3'-phosphate
  modified_base 6: mod_base = OTHER; note = adenosine-3'-phosphate
  modified_base 7: mod_base = OTHER; note = cytidine-3'-phosphate
  modified_base 8: mod_base = OTHER; note = adenosine-3'-phosphate
  modified_base 9: mod_base = OTHER; note = uridine-3'-phosphate
  modified_base 10: mod_base = OTHER; note = guanosine-3'-phosphate
  modified_base 11: mod_base = OTHER; note = uridine-3'-phosphate
  modified_base 12: mod_base = OTHER; note = adenosine-3'-phosphate
  modified_base 13: mod_base = OTHER; note = cytidine-3'-phosphate
  modified_base 14: mod_base = OTHER; note = uridine-3'-phosphate
  modified_base 15: mod_base = OTHER; note = guanosine-3'-phosphate
  modified_base 16: mod_base = OTHER; note = uridine-3'-phosphate
  modified_base 17: mod_base = OTHER; note = adenosine-3'-phosphate
  modified_base 18: mod_base = OTHER; note = guanosine-3'-phosphate
  modified_base 19: mod_base = OTHER; note = cytidine-3'-phosphate
  misc_feature 1..19: note = RNA
  misc_feature 20..21: note = DNA
ttgttacatgtactgtagctt

SEQ ID NO: 2740 - DNA, 21 bp, synthetic construct
  source 1..21: mol_type = other DNA
  modified_base 1: mod_base = OTHER; note = uridine-3'-phosphate
  modified_base 2: mod_base = OTHER; note = uridine-3'-phosphate
  modified_base 3: mod_base = OTHER; note = uridine-3'-phosphate
  modified_base 4: mod_base = OTHER; note = guanosine-3'-phosphate
  modified_base 5: mod_base = OTHER; note = uridine-3'-phosphate
  modified_base 6: mod_base = OTHER; note = guanosine-3'-phosphate
  modified_base 7: mod_base = OTHER; note = adenosine-3'-phosphate
  modified_base 8: mod_base = OTHER; note = adenosine-3'-phosphate
  modified_base 9: mod_base = OTHER; note = cytidine-3'-phosphate
  modified_base 10: mod_base = OTHER; note = uridine-3'-phosphate
  modified_base 11: mod_base = OTHER; note = adenosine-3'-phosphate
  modified_base 12: mod_base = OTHER; note = cytidine-3'-phosphate
  modified_base 13: mod_base = OTHER; note = adenosine-3'-phosphate
  modified_base 14: mod_base = OTHER; note = guanosine-3'-phosphate
  modified_base 15: mod_base = OTHER; note = uridine-3'-phosphate
  modified_base 16: mod_base = OTHER; note = uridine-3'-phosphate
  modified_base 17: mod_base = OTHER; note = guanosine-3'-phosphate
  modified_base 18: mod_base = OTHER; note = uridine-3'-phosphate
  modified_base 19: mod_base = OTHER; note = uridine-3'-phosphate
  misc_feature 1..19: note = RNA
  misc_feature 20..21: note = DNA
tttgtgaactacagttgtttt

SEQ ID NO: 2741 - DNA, 21 bp, synthetic construct
  source 1..21: mol_type = other DNA
  modified_base 1: mod_base = OTHER; note = uridine-3'-phosphate
  modified_base 2: mod_base = OTHER; note = adenosine-3'-phosphate
  modified_base 3: mod_base = OTHER; note = cytidine-3'-phosphate
  modified_base 4: mod_base = OTHER; note = uridine-3'-phosphate
  modified_base 5: mod_base = OTHER; note = guanosine-3'-phosphate
  modified_base 6: mod_base = OTHER; note = guanosine-3'-phosphate
  modified_base 7: mod_base = OTHER; note = uridine-3'-phosphate
  modified_base 8: mod_base = OTHER; note = uridine-3'-phosphate
  modified_base 9: mod_base = OTHER; note = uridine-3'-phosphate
  modified_base 10: mod_base = OTHER; note = uridine-3'-phosphate
  modified_base 11: mod_base = OTHER; note = guanosine-3'-phosphate
  modified_base 12: mod_base = OTHER; note = uridine-3'-phosphate
  modified_base 13: mod_base = OTHER; note = guanosine-3'-phosphate
  modified_base 14: mod_base = OTHER; note = adenosine-3'-phosphate
  modified_base 15: mod_base = OTHER; note = adenosine-3'-phosphate
  modified_base 16: mod_base = OTHER; note = cytidine-3'-phosphate
  modified_base 17: mod_base = OTHER; note = uridine-3'-phosphate
  modified_base 18: mod_base = OTHER; note = adenosine-3'-phosphate
  modified_base 19: mod_base = OTHER; note = cytidine-3'-phosphate
  misc_feature 1..19: note = RNA
  misc_feature 20..21: note = DNA
tactggttttgtgaactactt

SEQ ID NO: 2742 - DNA, 21 bp, synthetic construct
  source 1..21: mol_type = other DNA
  modified_base 1: mod_base = OTHER; note = uridine-3'-phosphate
  modified_base 2: mod_base = OTHER; note = cytidine-3'-phosphate
  modified_base 3: mod_base = OTHER; note = cytidine-3'-phosphate
  modified_base 4: mod_base = OTHER; note = uridine-3'-phosphate
  modified_base 5: mod_base = OTHER; note = cytidine-3'-phosphate
  modified_base 6: mod_base = OTHER; note = adenosine-3'-phosphate
  modified_base 7: mod_base = OTHER; note = guanosine-3'-phosphate
  modified_base 8: mod_base = OTHER; note = adenosine-3'-phosphate
  modified_base 9: mod_base = OTHER; note = guanosine-3'-phosphate
  modified_base 10: mod_base = OTHER; note = guanosine-3'-phosphate
  modified_base 11: mod_base = OTHER; note = uridine-3'-phosphate
  modified_base 12: mod_base = OTHER; note = adenosine-3'-phosphate
  modified_base 13: mod_base = OTHER; note = cytidine-3'-phosphate
  modified_base 14: mod_base = OTHER; note = uridine-3'-phosphate
  modified_base 15: mod_base = OTHER; note = guanosine-3'-phosphate
  modified_base 16: mod_base = OTHER; note = guanosine-3'-phosphate
  modified_base 17: mod_base = OTHER; note = uridine-3'-phosphate
  modified_base 18: mod_base = OTHER; note = uridine-3'-phosphate
  modified_base 19: mod_base = OTHER; note = uridine-3'-phosphate
  misc_feature 1..19: note = RNA
  misc_feature 20..21: note = DNA
tcctcagaggtactggttttt

SEQ ID NO: 2743 - DNA, 21 bp, synthetic construct
  source 1..21: mol_type = other DNA
  modified_base 1: mod_base = OTHER; note = adenosine-3'-phosphate
  modified_base 2: mod_base = OTHER; note = adenosine-3'-phosphate
  modified_base 3: mod_base = OTHER; note = adenosine-3'-phosphate
  modified_base 4: mod_base = OTHER; note = guanosine-3'-phosphate
  modified_base 5: mod_base = OTHER; note = cytidine-3'-phosphate
  modified_base 6: mod_base = OTHER; note = uridine-3'-phosphate
  modified_base 7: mod_base = OTHER; note = guanosine-3'-phosphate
  modified_base 8: mod_base = OTHER; note = cytidine-3'-phosphate
  modified_base 9: mod_base = OTHER; note = adenosine-3'-phosphate
  modified_base 10: mod_base = OTHER; note = adenosine-3'-phosphate
  modified_base 11: mod_base = OTHER; note = adenosine-3'-phosphate
  modified_base 12: mod_base = OTHER; note = cytidine-3'-phosphate
  modified_base 13: mod_base = OTHER; note = uridine-3'-phosphate
  modified_base 14: mod_base = OTHER; note = uridine-3'-phosphate
  modified_base 15: mod_base = OTHER; note = cytidine-3'-phosphate
  modified_base 16: mod_base = OTHER; note = cytidine-3'-phosphate
  modified_base 17: mod_base = OTHER; note = uridine-3'-phosphate
  modified_base 18: mod_base = OTHER; note = cytidine-3'-phosphate
  modified_base 19: mod_base = OTHER; note = adenosine-3'-phosphate
  misc_feature 1..19: note = RNA
  misc_feature 20..21: note = DNA
aaagctgcaaacttcctcatt

SEQ ID NO: 2744 - DNA, 21 bp, synthetic construct
  source 1..21: mol_type = other DNA
  modified_base 1: mod_base = OTHER; note = uridine-3'-phosphate
  modified_base 2: mod_base = OTHER; note = uridine-3'-phosphate
  modified_base 3: mod_base = OTHER; note = uridine-3'-phosphate
  modified_base 4: mod_base = OTHER; note = uridine-3'-phosphate
  modified_base 5: mod_base = OTHER; note = cytidine-3'-phosphate
  modified_base 6: mod_base = OTHER; note = adenosine-3'-phosphate
  modified_base 7: mod_base = OTHER; note = adenosine-3'-phosphate
  modified_base 8: mod_base = OTHER; note = adenosine-3'-phosphate
  modified_base 9: mod_base = OTHER; note = uridine-3'-phosphate
  modified_base 10: mod_base = OTHER; note = adenosine-3'-phosphate
  modified_base 11: mod_base = OTHER; note = adenosine-3'-phosphate
  modified_base 12: mod_base = OTHER; note = adenosine-3'-phosphate
  modified_base 13: mod_base = OTHER; note = adenosine-3'-phosphate
  modified_base 14: mod_base = OTHER; note = guanosine-3'-phosphate
  modified_base 15: mod_base = OTHER; note = cytidine-3'-phosphate
  modified_base 16: mod_base = OTHER; note = uridine-3'-phosphate
  modified_base 17: mod_base = OTHER; note = guanosine-3'-phosphate
  modified_base 18: mod_base = OTHER; note = cytidine-3'-phosphate
  modified_base 19: mod_base = OTHER; note = adenosine-3'-phosphate
  misc_feature 1..19: note = RNA
  misc_feature 20..21: note = DNA
ttttcaaataaaagctgcatt

SEQ ID NO: 2745 - DNA, 21 bp, synthetic construct
  source 1..21: mol_type = other DNA
  modified_base 1: mod_base = OTHER; note = uridine-3'-phosphate
  modified_base 2: mod_base = OTHER; note = guanosine-3'-phosphate
  modified_base 3: mod_base = OTHER; note = adenosine-3'-phosphate
  modified_base 4: mod_base = OTHER; note = guanosine-3'-phosphate
  modified_base 5: mod_base = OTHER; note = uridine-3'-phosphate
  modified_base 6: mod_base = OTHER; note = adenosine-3'-phosphate
  modified_base 7: mod_base = OTHER; note = uridine-3'-phosphate
  modified_base 8: mod_base = OTHER; note = cytidine-3'-phosphate
  modified_base 9: mod_base = OTHER; note = guanosine-3'-phosphate
  modified_base 10: mod_base = OTHER; note = adenosine-3'-phosphate
  modified_base 11: mod_base = OTHER; note = uridine-3'-phosphate
  modified_base 12: mod_base = OTHER; note = uridine-3'-phosphate
  modified_base 13: mod_base = OTHER; note = uridine-3'-phosphate
  modified_base 14: mod_base = OTHER; note = uridine-3'-phosphate
  modified_base 15: mod_base = OTHER; note = cytidine-3'-phosphate
  modified_base 16: mod_base = OTHER; note = adenosine-3'-phosphate
  modified_base 17: mod_base = OTHER; note = adenosine-3'-phosphate
  modified_base 18: mod_base = OTHER; note = adenosine-3'-phosphate
  modified_base 19: mod_base = OTHER; note = uridine-3'-phosphate
  misc_feature 1..19: note = RNA
  misc_feature 20..21: note = DNA
tgagtatcgattttcaaattt

SEQ ID NO: 2746 - DNA, 21 bp, synthetic construct
  source 1..21: mol_type = other DNA
  modified_base 1: mod_base = OTHER; note = uridine-3'-phosphate
  modified_base 2: mod_base = OTHER; note = uridine-3'-phosphate
  modified_base 3: mod_base = OTHER; note = cytidine-3'-phosphate
  modified_base 4: mod_base = OTHER; note = adenosine-3'-phosphate
  modified_base 5: mod_base = OTHER; note = adenosine-3'-phosphate
  modified_base 6: mod_base = OTHER; note = uridine-3'-phosphate
  modified_base 7: mod_base = OTHER; note = adenosine-3'-phosphate
  modified_base 8: mod_base = OTHER; note = uridine-3'-phosphate
  modified_base 9: mod_base = OTHER; note = cytidine-3'-phosphate
  modified_base 10: mod_base = OTHER; note = cytidine-3'-phosphate
  modified_base 11: mod_base = OTHER; note = uridine-3'-phosphate
  modified_base 12: mod_base = OTHER; note = guanosine-3'-phosphate
  modified_base 13: mod_base = OTHER; note = adenosine-3'-phosphate
  modified_base 14: mod_base = OTHER; note = guanosine-3'-phosphate
  modified_base 15: mod_base = OTHER; note = uridine-3'-phosphate
  modified_base 16: mod_base = OTHER; note = adenosine-3'-phosphate
  modified_base 17: mod_base = OTHER; note = uridine-3'-phosphate
  modified_base 18: mod_base = OTHER; note = cytidine-3'-phosphate
  modified_base 19: mod_base = OTHER; note = guanosine-3'-phosphate
  misc_feature 1..19: note = RNA
  misc_feature 20..21: note = DNA
ttcaatatcctgagtatcgtt

SEQ ID NO: 2747 - DNA, 21 bp, synthetic construct
  source 1..21: mol_type = other DNA
  modified_base 1: mod_base = OTHER; note = guanosine-3'-phosphate
  modified_base 2: mod_base = OTHER; note = uridine-3'-phosphate
  modified_base 3: mod_base = OTHER; note = guanosine-3'-phosphate
  modified_base 4: mod_base = OTHER; note = guanosine-3'-phosphate
  modified_base 5: mod_base = OTHER; note = guanosine-3'-phosphate
  modified_base 6: mod_base = OTHER; note = adenosine-3'-phosphate
  modified_base 7: mod_base = OTHER; note = uridine-3'-phosphate
  modified_base 8: mod_base = OTHER; note = guanosine-3'-phosphate
  modified_base 9: mod_base = OTHER; note = cytidine-3'-phosphate
  modified_base 10: mod_base = OTHER; note = uridine-3'-phosphate
  modified_base 11: mod_base = OTHER; note = uridine-3'-phosphate
  modified_base 12: mod_base = OTHER; note = cytidine-3'-phosphate
  modified_base 13: mod_base = OTHER; note = adenosine-3'-phosphate
  modified_base 14: mod_base = OTHER; note = adenosine-3'-phosphate
  modified_base 15: mod_base = OTHER; note = uridine-3'-phosphate
  modified_base 16: mod_base = OTHER; note = adenosine-3'-phosphate
  modified_base 17: mod_base = OTHER; note = uridine-3'-phosphate
  modified_base 18: mod_base = OTHER; note = cytidine-3'-phosphate
  modified_base 19: mod_base = OTHER; note = cytidine-3'-phosphate
  misc_feature 1..19: note = RNA
  misc_feature 20..21: note = DNA
gtgggatgcttcaatatcctt

SEQ ID NO: 2748 - DNA, 21 bp, synthetic construct
  source 1..21: mol_type = other DNA
  modified_base 1: mod_base = OTHER; note = cytidine-3'-phosphate
  modified_base 2: mod_base = OTHER; note = uridine-3'-phosphate
  modified_base 3: mod_base = OTHER; note = cytidine-3'-phosphate
  modified_base 4: mod_base = OTHER; note = uridine-3'-phosphate
  modified_base 5: mod_base = OTHER; note = guanosine-3'-phosphate
  modified_base 6: mod_base = OTHER; note = uridine-3'-phosphate
  modified_base 7: mod_base = OTHER; note = adenosine-3'-phosphate
  modified_base 8: mod_base = OTHER; note = guanosine-3'-phosphate
  modified_base 9: mod_base = OTHER; note = uridine-3'-phosphate
  modified_base 10: mod_base = OTHER; note = guanosine-3'-phosphate
  modified_base 11: mod_base = OTHER; note = guanosine-3'-phosphate
  modified_base 12: mod_base = OTHER; note = guanosine-3'-phosphate
  modified_base 13: mod_base = OTHER; note = adenosine-3'-phosphate
  modified_base 14: mod_base = OTHER; note = uridine-3'-phosphate
  modified_base 15: mod_base = OTHER; note = guanosine-3'-phosphate
  modified_base 16: mod_base = OTHER; note = cytidine-3'-phosphate
  modified_base 17: mod_base = OTHER; note = uridine-3'-phosphate
  modified_base 18: mod_base = OTHER; note = uridine-3'-phosphate
  modified_base 19: mod_base = OTHER; note = cytidine-3'-phosphate
  misc_feature 1..19: note = RNA
  misc_feature 20..21: note = DNA
ctctgtagtgggatgcttctt

SEQ ID NO: 2749 - DNA, 21 bp, synthetic construct
  source 1..21: mol_type = other DNA
  modified_base 1: mod_base = OTHER; note = uridine-3'-phosphate
  modified_base 2: mod_base = OTHER; note = uridine-3'-phosphate
  modified_base 3: mod_base = OTHER; note = uridine-3'-phosphate
  modified_base 4: mod_base = OTHER; note = cytidine-3'-phosphate
  modified_base 5: mod_base = OTHER; note = cytidine-3'-phosphate
  modified_base 6: mod_base = OTHER; note = guanosine-3'-phosphate
  modified_base 7: mod_base = OTHER; note = uridine-3'-phosphate
  modified_base 8: mod_base = OTHER; note = adenosine-3'-phosphate
  modified_base 9: mod_base = OTHER; note = guanosine-3'-phosphate
  modified_base 10: mod_base = OTHER; note = cytidine-3'-phosphate
  modified_base 11: mod_base = OTHER; note = cytidine-3'-phosphate
  modified_base 12: mod_base = OTHER; note = uridine-3'-phosphate
  modified_base 13: mod_base = OTHER; note = cytidine-3'-phosphate
  modified_base 14: mod_base = OTHER; note = uridine-3'-phosphate
  modified_base 15: mod_base = OTHER; note = guanosine-3'-phosphate
  modified_base 16: mod_base = OTHER; note = uridine-3'-phosphate
  modified_base 17: mod_base = OTHER; note = adenosine-3'-phosphate
  modified_base 18: mod_base = OTHER; note = guanosine-3'-phosphate
  modified_base 19: mod_base = OTHER; note = uridine-3'-phosphate
  misc_feature 1..19: note = RNA
  misc_feature 20..21: note = DNA
tttccgtagcctctgtagttt

SEQ ID NO: 2750 - DNA, 21 bp, synthetic construct
  source 1..21: mol_type = other DNA
  modified_base 1: mod_base = OTHER; note = uridine-3'-phosphate
  modified_base 2: mod_base = OTHER; note = uridine-3'-phosphate
  modified_base 3: mod_base = OTHER; note = uridine-3'-phosphate
  modified_base 4: mod_base = OTHER; note = guanosine-3'-phosphate
  modified_base 5: mod_base = OTHER; note = uridine-3'-phosphate
  modified_base 6: mod_base = OTHER; note = adenosine-3'-phosphate
  modified_base 7: mod_base = OTHER; note = adenosine-3'-phosphate
  modified_base 8: mod_base = OTHER; note = uridine-3'-phosphate
  modified_base 9: mod_base = OTHER; note = cytidine-3'-phosphate
  modified_base 10: mod_base = OTHER; note = adenosine-3'-phosphate
  modified_base 11: mod_base = OTHER; note = guanosine-3'-phosphate
  modified_base 12: mod_base = OTHER; note = adenosine-3'-phosphate
  modified_base 13: mod_base = OTHER; note = guanosine-3'-phosphate
  modified_base 14: mod_base = OTHER; note = uridine-3'-phosphate
  modified_base 15: mod_base = OTHER; note = uridine-3'-phosphate
  modified_base 16: mod_base = OTHER; note = uridine-3'-phosphate
  modified_base 17: mod_base = OTHER; note = cytidine-3'-phosphate
  modified_base 18: mod_base = OTHER; note = cytidine-3'-phosphate
  modified_base 19: mod_base = OTHER; note = guanosine-3'-phosphate
  misc_feature 1..19: note = RNA
  misc_feature 20..21: note = DNA
tttgtaatcagagtttccgtt

SEQ ID NO: 2751 - DNA, 21 bp, synthetic construct
  source 1..21: mol_type = other DNA
  modified_base 1: mod_base = OTHER; note = uridine-3'-phosphate
  modified_base 2: mod_base = OTHER; note = adenosine-3'-phosphate
  modified_base 3: mod_base = OTHER; note = cytidine-3'-phosphate
  modified_base 4: mod_base = OTHER; note = uridine-3'-phosphate
  modified_base 5: mod_base = OTHER; note = adenosine-3'-phosphate
  modified_base 6: mod_base = OTHER; note = uridine-3'-phosphate
  modified_base 7: mod_base = OTHER; note = guanosine-3'-phosphate
  modified_base 8: mod_base = OTHER; note = cytidine-3'-phosphate
  modified_base 9: mod_base = OTHER; note = guanosine-3'-phosphate
  modified_base 10: mod_base = OTHER; note = uridine-3'-phosphate
  modified_base 11: mod_base = OTHER; note = uridine-3'-phosphate
  modified_base 12: mod_base = OTHER; note = uridine-3'-phosphate
  modified_base 13: mod_base = OTHER; note = guanosine-3'-phosphate
  modified_base 14: mod_base = OTHER; note = uridine-3'-phosphate
  modified_base 15: mod_base = OTHER; note = adenosine-3'-phosphate
  modified_base 16: mod_base = OTHER; note = adenosine-3'-phosphate
  modified_base 17: mod_base = OTHER; note = uridine-3'-phosphate
  modified_base 18: mod_base = OTHER; note = cytidine-3'-phosphate
  modified_base 19: mod_base = OTHER; note = adenosine-3'-phosphate
  misc_feature 1..19: note = RNA
  misc_feature 20..21: note = DNA
tactatgcgtttgtaatcatt

SEQ ID NO: 2752 - DNA, 21 bp, synthetic construct
  source 1..21: mol_type = other DNA
  modified_base 1: mod_base = OTHER; note = cytidine-3'-phosphate
  modified_base 2: mod_base = OTHER; note = uridine-3'-phosphate
  modified_base 3: mod_base = OTHER; note = guanosine-3'-phosphate
  modified_base 4: mod_base = OTHER; note = guanosine-3'-phosphate
  modified_base 5: mod_base = OTHER; note = cytidine-3'-phosphate
  modified_base 6: mod_base = OTHER; note = adenosine-3'-phosphate
  modified_base 7: mod_base = OTHER; note = cytidine-3'-phosphate
  modified_base 8: mod_base = OTHER; note = adenosine-3'-phosphate
  modified_base 9: mod_base = OTHER; note = uridine-3'-phosphate
  modified_base 10: mod_base = OTHER; note = guanosine-3'-phosphate
  modified_base 11: mod_base = OTHER; note = cytidine-3'-phosphate
  modified_base 12: mod_base = OTHER; note = uridine-3'-phosphate
  modified_base 13: mod_base = OTHER; note = adenosine-3'-phosphate
  modified_base 14: mod_base = OTHER; note = cytidine-3'-phosphate
  modified_base 15: mod_base = OTHER; note = uridine-3'-phosphate
  modified_base 16: mod_base = OTHER; note = adenosine-3'-phosphate
  modified_base 17: mod_base = OTHER; note = uridine-3'-phosphate
  modified_base 18: mod_base = OTHER; note = guanosine-3'-phosphate
  modified_base 19: mod_base = OTHER; note = cytidine-3'-phosphate
  misc_feature 1..19: note = RNA
  misc_feature 20..21: note = DNA
ctggcacatgctactatgctt

SEQ ID NO: 2753 - DNA, 21 bp, synthetic construct
  source 1..21: mol_type = other DNA
  modified_base 1: mod_base = OTHER; note = guanosine-3'-phosphate
  modified_base 2: mod_base = OTHER; note = cytidine-3'-phosphate
  modified_base 3: mod_base = OTHER; note = uridine-3'-phosphate
  modified_base 4: mod_base = OTHER; note = uridine-3'-phosphate
  modified_base 5: mod_base = OTHER; note = guanosine-3'-phosphate
  modified_base 6: mod_base = OTHER; note = uridine-3'-phosphate
  modified_base 7: mod_base = OTHER; note = adenosine-3'-phosphate
  modified_base 8: mod_base = OTHER; note = guanosine-3'-phosphate
  modified_base 9: mod_base = OTHER; note = cytidine-3'-phosphate
  modified_base 10: mod_base = OTHER; note = uridine-3'-phosphate
  modified_base 11: mod_base = OTHER; note = guanosine-3'-phosphate
  modified_base 12: mod_base = OTHER; note = guanosine-3'-phosphate
  modified_base 13: mod_base = OTHER; note = cytidine-3'-phosphate
  modified_base 14: mod_base = OTHER; note = adenosine-3'-phosphate
  modified_base 15: mod_base = OTHER; note = cytidine-3'-phosphate
  modified_base 16: mod_base = OTHER; note = adenosine-3'-phosphate
  modified_base 17: mod_base = OTHER; note = uridine-3'-phosphate
  modified_base 18: mod_base = OTHER; note = guanosine-3'-phosphate
  modified_base 19: mod_base = OTHER; note = cytidine-3'-phosphate
  misc_feature 1..19: note = RNA
  misc_feature 20..21: note = DNA
gcttgtagctggcacatgctt

SEQ ID NO: 2754 - DNA, 21 bp, synthetic construct
  source 1..21: mol_type = other DNA
  modified_base 1: mod_base = OTHER; note = uridine-3'-phosphate
  modified_base 2: mod_base = OTHER; note = uridine-3'-phosphate
  modified_base 3: mod_base = OTHER; note = cytidine-3'-phosphate
  modified_base 4: mod_base = OTHER; note = cytidine-3'-phosphate
  modified_base 5: mod_base = OTHER; note = cytidine-3'-phosphate
  modified_base 6: mod_base = OTHER; note = uridine-3'-phosphate
  modified_base 7: mod_base = OTHER; note = guanosine-3'-phosphate
  modified_base 8: mod_base = OTHER; note = cytidine-3'-phosphate
  modified_base 9: mod_base = OTHER; note = uridine-3'-phosphate
  modified_base 10: mod_base = OTHER; note = guanosine-3'-phosphate
  modified_base 11: mod_base = OTHER; note = guanosine-3'-phosphate
  modified_base 12: mod_base = OTHER; note = guanosine-3'-phosphate
  modified_base 13: mod_base = OTHER; note = cytidine-3'-phosphate
  modified_base 14: mod_base = OTHER; note = uridine-3'-phosphate
  modified_base 15: mod_base = OTHER; note = uridine-3'-phosphate
  modified_base 16: mod_base = OTHER; note = guanosine-3'-phosphate
  modified_base 17: mod_base = OTHER; note = uridine-3'-phosphate
  modified_base 18: mod_base = OTHER; note = adenosine-3'-phosphate
  modified_base 19: mod_base = OTHER; note = guanosine-3'-phosphate
  misc_feature 1..19: note = RNA
  misc_feature 20..21: note = DNA
ttccctgctgggcttgtagtt

SEQ ID NO: 2755 - DNA, 21 bp, synthetic construct
  source 1..21: mol_type = other DNA
  modified_base 1: mod_base = OTHER; note = uridine-3'-phosphate
  modified_base 2: mod_base = OTHER; note = guanosine-3'-phosphate
  modified_base 3: mod_base = OTHER; note = adenosine-3'-phosphate
  modified_base 4: mod_base = OTHER; note = uridine-3'-phosphate
  modified_base 5: mod_base = OTHER; note = guanosine-3'-phosphate
  modified_base 6: mod_base = OTHER; note = adenosine-3'-phosphate
  modified_base 7: mod_base = OTHER; note = uridine-3'-phosphate
  modified_base 8: mod_base = OTHER; note = uridine-3'-phosphate
  modified_base 9: mod_base = OTHER; note = cytidine-3'-phosphate
  modified_base 10: mod_base = OTHER; note = uridine-3'-phosphate
  modified_base 11: mod_base = OTHER; note = uridine-3'-phosphate
  modified_base 12: mod_base = OTHER; note = cytidine-3'-phosphate
  modified_base 13: mod_base = OTHER; note = cytidine-3'-phosphate
  modified_base 14: mod_base = OTHER; note = cytidine-3'-phosphate
  modified_base 15: mod_base = OTHER; note = uridine-3'-phosphate
  modified_base 16: mod_base = OTHER; note = guanosine-3'-phosphate
  modified_base 17: mod_base = OTHER; note = cytidine-3'-phosphate
  modified_base 18: mod_base = OTHER; note = uridine-3'-phosphate
  modified_base 19: mod_base = OTHER; note = guanosine-3'-phosphate
  misc_feature 1..19: note = RNA
  misc_feature 20..21: note = DNA
tgatgattcttccctgctgtt

SEQ ID NO: 2756 - DNA, 21 bp, synthetic construct
  source 1..21: mol_type = other DNA
  modified_base 1: mod_base = OTHER; note = adenosine-3'-phosphate
  modified_base 2: mod_base = OTHER; note = guanosine-3'-phosphate
  modified_base 3: mod_base = OTHER; note = guanosine-3'-phosphate
  modified_base 4: mod_base = OTHER; note = adenosine-3'-phosphate
  modified_base 5: mod_base = OTHER; note = uridine-3'-phosphate
  modified_base 6: mod_base = OTHER; note = cytidine-3'-phosphate
  modified_base 7: mod_base = OTHER; note = cytidine-3'-phosphate
  modified_base 8: mod_base = OTHER; note = adenosine-3'-phosphate
  modified_base 9: mod_base = OTHER; note = guanosine-3'-phosphate
  modified_base 10: mod_base = OTHER; note = adenosine-3'-phosphate
  modified_base 11: mod_base = OTHER; note = uridine-3'-phosphate
  modified_base 12: mod_base = OTHER; note = guanosine-3'-phosphate
  modified_base 13: mod_base = OTHER; note = adenosine-3'-phosphate
  modified_base 14: mod_base = OTHER; note = uridine-3'-phosphate
  modified_base 15: mod_base = OTHER; note = guanosine-3'-phosphate
  modified_base 16: mod_base = OTHER; note = adenosine-3'-phosphate
  modified_base 17: mod_base = OTHER; note = uridine-3'-phosphate
  modified_base 18: mod_base = OTHER; note = uridine-3'-phosphate
  modified_base 19: mod_base = OTHER; note = cytidine-3'-phosphate
  misc_feature 1..19: note = RNA
  misc_feature 20..21: note = DNA
aggatccagatgatgattctt

SEQ ID NO: 2757 - DNA, 21 bp, synthetic construct
  source 1..21: mol_type = other DNA
  modified_base 1: mod_base = OTHER; note = adenosine-3'-phosphate
  modified_base 2: mod_base = OTHER; note = uridine-3'-phosphate
  modified_base 3: mod_base = OTHER; note = cytidine-3'-phosphate
  modified_base 4: mod_base = OTHER; note = adenosine-3'-phosphate
  modified_base 5: mod_base = OTHER; note = cytidine-3'-phosphate
  modified_base 6: mod_base = OTHER; note = cytidine-3'-phosphate
  modified_base 7: mod_base = OTHER; note = guanosine-3'-phosphate
  modified_base 8: mod_base = OTHER; note = cytidine-3'-phosphate
  modified_base 9: mod_base = OTHER; note = adenosine-3'-phosphate
  modified_base 10: mod_base = OTHER; note = uridine-3'-phosphate
  modified_base 11: mod_base = OTHER; note = guanosine-3'-phosphate
  modified_base 12: mod_base = OTHER; note = adenosine-3'-phosphate
  modified_base 13: mod_base = OTHER; note = guanosine-3'-phosphate
  modified_base 14: mod_base = OTHER; note = adenosine-3'-phosphate
  modified_base 15: mod_base = OTHER; note = guanosine-3'-phosphate
  modified_base 16: mod_base = OTHER; note = guanosine-3'-phosphate
  modified_base 17: mod_base = OTHER; note = adenosine-3'-phosphate
  modified_base 18: mod_base = OTHER; note = uridine-3'-phosphate
  modified_base 19: mod_base = OTHER; note = cytidine-3'-phosphate
  misc_feature 1..19: note = RNA
  misc_feature 20..21: note = DNA
atcaccgcatgagaggatctt

SEQ ID NO: 2758 - DNA, 21 bp, synthetic construct
  source 1..21: mol_type = other DNA
  modified_base 1: mod_base = OTHER; note = adenosine-3'-phosphate
  modified_base 2: mod_base = OTHER; note = uridine-3'-phosphate
  modified_base 3: mod_base = OTHER; note = guanosine-3'-phosphate
  modified_base 4: mod_base = OTHER; note = uridine-3'-phosphate
  modified_base 5: mod_base = OTHER; note = cytidine-3'-phosphate
  modified_base 6: mod_base = OTHER; note = cytidine-3'-phosphate
  modified_base 7: mod_base = OTHER; note = adenosine-3'-phosphate
  modified_base 8: mod_base = OTHER; note = uridine-3'-phosphate
  modified_base 9: mod_base = OTHER; note = cytidine-3'-phosphate
  modified_base 10: mod_base = OTHER; note = adenosine-3'-phosphate
  modified_base 11: mod_base = OTHER; note = cytidine-3'-phosphate
  modified_base 12: mod_base = OTHER; note = cytidine-3'-phosphate
  modified_base 13: mod_base = OTHER; note = guanosine-3'-phosphate
  modified_base 14: mod_base = OTHER; note = cytidine-3'-phosphate
  modified_base 15: mod_base = OTHER; note = adenosine-3'-phosphate
  modified_base 16: mod_base = OTHER; note = uridine-3'-phosphate
  modified_base 17: mod_base = OTHER; note = guanosine-3'-phosphate
  modified_base 18: mod_base = OTHER; note = adenosine-3'-phosphate
  modified_base 19: mod_base = OTHER; note = guanosine-3'-phosphate
  misc_feature 1..19: note = RNA
  misc_feature 20..21: note = DNA
atgtccatcaccgcatgagtt

SEQ ID NO: 2759 - DNA, 21 bp, synthetic construct
  source 1..21: mol_type = other DNA
  modified_base 1: mod_base = OTHER; note = adenosine-3'-phosphate
  modified_base 2: mod_base = OTHER; note = guanosine-3'-phosphate
  modified_base 3: mod_base = OTHER; note = guanosine-3'-phosphate
  modified_base 4: mod_base = OTHER; note = cytidine-3'-phosphate
  modified_base 5: mod_base = OTHER; note = adenosine-3'-phosphate
  modified_base 6: mod_base = OTHER; note = adenosine-3'-phosphate
  modified_base 7: mod_base = OTHER; note = guanosine-3'-phosphate
  modified_base 8: mod_base = OTHER; note = guanosine-3'-phosphate
  modified_base 9: mod_base = OTHER; note = adenosine-3'-phosphate
  modified_base 10: mod_base = OTHER; note = guanosine-3'-phosphate
  modified_base 11: mod_base = OTHER; note = adenosine-3'-phosphate
  modified_base 12: mod_base = OTHER; note = uridine-3'-phosphate
  modified_base 13: mod_base = OTHER; note = guanosine-3'-phosphate
  modified_base 14: mod_base = OTHER; note = uridine-3'-phosphate
  modified_base 15: mod_base = OTHER; note = cytidine-3'-phosphate
  modified_base 16: mod_base = OTHER; note = cytidine-3'-phosphate
  modified_base 17: mod_base = OTHER; note = adenosine-3'-phosphate
  modified_base 18: mod_base = OTHER; note = uridine-3'-phosphate
  modified_base 19: mod_base = OTHER; note = cytidine-3'-phosphate
  misc_feature 1..19: note = RNA
  misc_feature 20..21: note = DNA
aggcaaggagatgtccatctt

SEQ ID NO: 2760 - DNA, 21 bp, synthetic construct
  source 1..21: mol_type = other DNA
  modified_base 1: mod_base = OTHER; note = adenosine-3'-phosphate
  modified_base 2: mod_base = OTHER; note = cytidine-3'-phosphate
  modified_base 3: mod_base = OTHER; note = uridine-3'-phosphate
  modified_base 4: mod_base = OTHER; note = guanosine-3'-phosphate
  modified_base 5: mod_base = OTHER; note = adenosine-3'-phosphate
  modified_base 6: mod_base = OTHER; note = uridine-3'-phosphate
  modified_base 7: mod_base = OTHER; note = uridine-3'-phosphate
  modified_base 8: mod_base = OTHER; note = cytidine-3'-phosphate
  modified_base 9: mod_base = OTHER; note = cytidine-3'-phosphate
  modified_base 10: mod_base = OTHER; note = adenosine-3'-phosphate
  modified_base 11: mod_base = OTHER; note = guanosine-3'-phosphate
  modified_base 12: mod_base = OTHER; note = uridine-3'-phosphate
  modified_base 13: mod_base = OTHER; note = adenosine-3'-phosphate
  modified_base 14: mod_base = OTHER; note = guanosine-3'-phosphate
  modified_base 15: mod_base = OTHER; note = guanosine-3'-phosphate
  modified_base 16: mod_base = OTHER; note = cytidine-3'-phosphate
  modified_base 17: mod_base = OTHER; note = adenosine-3'-phosphate
  modified_base 18: mod_base = OTHER; note = adenosine-3'-phosphate
  modified_base 19: mod_base = OTHER; note = guanosine-3'-phosphate
  misc_feature 1..19: note = RNA
  misc_feature 20..21: note = DNA
actgattccagtaggcaagtt

SEQ ID NO: 2761 - DNA, 21 bp, synthetic construct
  source 1..21: mol_type = other DNA
  modified_base 1: mod_base = OTHER; note = uridine-3'-phosphate
  modified_base 2: mod_base = OTHER; note = cytidine-3'-phosphate
  modified_base 3: mod_base = OTHER; note = uridine-3'-phosphate
  modified_base 4: mod_base = OTHER; note = uridine-3'-phosphate
  modified_base 5: mod_base = OTHER; note = cytidine-3'-phosphate
  modified_base 6: mod_base = OTHER; note = adenosine-3'-phosphate
  modified_base 7: mod_base = OTHER; note = uridine-3'-phosphate
  modified_base 8: mod_base = OTHER; note = uridine-3'-phosphate
  modified_base 9: mod_base = OTHER; note = uridine-3'-phosphate
  modified_base 10: mod_base = OTHER; note = guanosine-3'-phosphate
  modified_base 11: mod_base = OTHER; note = cytidine-3'-phosphate
  modified_base 12: mod_base = OTHER; note = adenosine-3'-phosphate
  modified_base 13: mod_base = OTHER; note = cytidine-3'-phosphate
  modified_base 14: mod_base = OTHER; note = uridine-3'-phosphate
  modified_base 15: mod_base = OTHER; note = guanosine-3'-phosphate
  modified_base 16: mod_base = OTHER; note = adenosine-3'-phosphate
  modified_base 17: mod_base = OTHER; note = uridine-3'-phosphate
  modified_base 18: mod_base = OTHER; note = uridine-3'-phosphate
  modified_base 19: mod_base = OTHER; note = cytidine-3'-phosphate
  misc_feature 1..19: note = RNA
  misc_feature 20..21: note = DNA
tcttcatttgcactgattctt

SEQ ID NO: 2762 - DNA, 21 bp, synthetic construct
  source 1..21: mol_type = other DNA
  modified_base 1: mod_base = OTHER; note = uridine-3'-phosphate
  modified_base 2: mod_base = OTHER; note = uridine-3'-phosphate
  modified_base 3: mod_base = OTHER; note = uridine-3'-phosphate
  modified_base 4: mod_base = OTHER; note = uridine-3'-phosphate
  modified_base 5: mod_base = OTHER; note = adenosine-3'-phosphate
  modified_base 6: mod_base = OTHER; note = adenosine-3'-phosphate
  modified_base 7: mod_base = OTHER; note = guanosine-3'-phosphate
  modified_base 8: mod_base = OTHER; note = uridine-3'-phosphate
  modified_base 9: mod_base = OTHER; note = cytidine-3'-phosphate
  modified_base 10: mod_base = OTHER; note = uridine-3'-phosphate
  modified_base 11: mod_base = OTHER; note = uridine-3'-phosphate
  modified_base 12: mod_base = OTHER; note = cytidine-3'-phosphate
  modified_base 13: mod_base = OTHER; note = uridine-3'-phosphate
  modified_base 14: mod_base = OTHER; note = uridine-3'-phosphate
  modified_base 15: mod_base = OTHER; note = cytidine-3'-phosphate
  modified_base 16: mod_base = OTHER; note = adenosine-3'-phosphate
  modified_base 17: mod_base = OTHER; note = uridine-3'-phosphate
  modified_base 18: mod_base = OTHER; note = uridine-3'-phosphate
  modified_base 19: mod_base = OTHER; note = uridine-3'-phosphate
  misc_feature 1..19: note = RNA
  misc_feature 20..21: note = DNA
ttttaagtcttcttcattttt

SEQ ID NO: 2763 - DNA, 21 bp, synthetic construct
  source 1..21: mol_type = other DNA
  modified_base 1: mod_base = OTHER; note = cytidine-3'-phosphate
  modified_base 2: mod_base = OTHER; note = adenosine-3'-phosphate
  modified_base 3: mod_base = OTHER; note = adenosine-3'-phosphate
  modified_base 4: mod_base = OTHER; note = guanosine-3'-phosphate
  modified_base 5: mod_base = OTHER; note = guanosine-3'-phosphate
  modified_base 6: mod_base = OTHER; note = guanosine-3'-phosphate
  modified_base 7: mod_base = OTHER; note = cytidine-3'-phosphate
  modified_base 8: mod_base = OTHER; note = uridine-3'-phosphate
  modified_base 9: mod_base = OTHER; note = uridine-3'-phosphate
  modified_base 10: mod_base = OTHER; note = uridine-3'-phosphate
  modified_base 11: mod_base = OTHER; note = uridine-3'-phosphate
  modified_base 12: mod_base = OTHER; note = adenosine-3'-phosphate
  modified_base 13: mod_base = OTHER; note = adenosine-3'-phosphate
  modified_base 14: mod_base = OTHER; note = guanosine-3'-phosphate
  modified_base 15: mod_base = OTHER; note = uridine-3'-phosphate
  modified_base 16: mod_base = OTHER; note = cytidine-3'-phosphate
  modified_base 17: mod_base = OTHER; note = uridine-3'-phosphate
  modified_base 18: mod_base = OTHER; note = uridine-3'-phosphate
  modified_base 19: mod_base = OTHER; note = cytidine-3'-phosphate
  misc_feature 1..19: note = RNA
  misc_feature 20..21: note = DNA
caagggcttttaagtcttctt

SEQ ID NO: 2764 - DNA, 21 bp, synthetic construct
  source 1..21: mol_type = other DNA
  modified_base 1: mod_base = OTHER; note = adenosine-3'-phosphate
  modified_base 2: mod_base = OTHER; note = uridine-3'-phosphate
  modified_base 3: mod_base = OTHER; note = cytidine-3'-phosphate
  modified_base 4: mod_base = OTHER; note = cytidine-3'-phosphate
  modified_base 5: mod_base = OTHER; note = adenosine-3'-phosphate
  modified_base 6: mod_base = OTHER; note = cytidine-3'-phosphate
  modified_base 7: mod_base = OTHER; note = cytidine-3'-phosphate
  modified_base 8: mod_base = OTHER; note = cytidine-3'-phosphate
  modified_base 9: mod_base = OTHER; note = cytidine-3'-phosphate
  modified_base 10: mod_base = OTHER; note = uridine-3'-phosphate
  modified_base 11: mod_base = OTHER; note = uridine-3'-phosphate
  modified_base 12: mod_base = OTHER; note = cytidine-3'-phosphate
  modified_base 13: mod_base = OTHER; note = cytidine-3'-phosphate
  modified_base 14: mod_base = OTHER; note = adenosine-3'-phosphate
  modified_base 15: mod_base = OTHER; note = cytidine-3'-phosphate
  modified_base 16: mod_base = OTHER; note = adenosine-3'-phosphate
  modified_base 17: mod_base = OTHER; note = adenosine-3'-phosphate
  modified_base 18: mod_base = OTHER; note = guanosine-3'-phosphate
  modified_base 19: mod_base = OTHER; note = guanosine-3'-phosphate
  misc_feature 1..19: note = RNA
  misc_feature 20..21: note = DNA
atccaccccttccacaaggtt

SEQ ID NO: 2765 - DNA, 21 bp, synthetic construct
  source 1..21: mol_type = other DNA
  modified_base 1: mod_base = OTHER; note = adenosine-3'-phosphate
  modified_base 2: mod_base = OTHER; note = uridine-3'-phosphate
  modified_base 3: mod_base = OTHER; note = adenosine-3'-phosphate
  modified_base 4: mod_base = OTHER; note = guanosine-3'-phosphate
  modified_base 5: mod_base = OTHER; note = uridine-3'-phosphate
  modified_base 6: mod_base = OTHER; note = uridine-3'-phosphate
  modified_base 7: mod_base = OTHER; note = guanosine-3'-phosphate
  modified_base 8: mod_base = OTHER; note = adenosine-3'-phosphate
  modified_base 9: mod_base = OTHER; note = uridine-3'-phosphate
  modified_base 10: mod_base = OTHER; note = cytidine-3'-phosphate
  modified_base 11: mod_base = OTHER; note = cytidine-3'-phosphate
  modified_base 12: mod_base = OTHER; note = adenosine-3'-phosphate
  modified_base 13: mod_base = OTHER; note = cytidine-3'-phosphate
  modified_base 14: mod_base = OTHER; note = cytidine-3'-phosphate
  modified_base 15: mod_base = OTHER; note = cytidine-3'-phosphate
  modified_base 16: mod_base = OTHER; note = cytidine-3'-phosphate
  modified_base 17: mod_base = OTHER; note = uridine-3'-phosphate
  modified_base 18: mod_base = OTHER; note = uridine-3'-phosphate
  modified_base 19: mod_base = OTHER; note = cytidine-3'-phosphate
  misc_feature 1..19: note = RNA
  misc_feature 20..21: note = DNA
atagttgatccaccccttctt

SEQ ID NO: 2766 - DNA, 21 bp, synthetic construct
  source 1..21: mol_type = other DNA
  modified_base 1: mod_base = OTHER; note = uridine-3'-phosphate
  modified_base 2: mod_base = OTHER; note = adenosine-3'-phosphate
  modified_base 3: mod_base = OTHER; note = adenosine-3'-phosphate
  modified_base 4: mod_base = OTHER; note = uridine-3'-phosphate
  modified_base 5: mod_base = OTHER; note = cytidine-3'-phosphate
  modified_base 6: mod_base = OTHER; note = adenosine-3'-phosphate
  modified_base 7: mod_base = OTHER; note = guanosine-3'-phosphate
  modified_base 8: mod_base = OTHER; note = uridine-3'-phosphate
  modified_base 9: mod_base = OTHER; note = guanosine-3'-phosphate
  modified_base 10: mod_base = OTHER; note = adenosine-3'-phosphate
  modified_base 11: mod_base = OTHER; note = adenosine-3'-phosphate
  modified_base 12: mod_base = OTHER; note = uridine-3'-phosphate
  modified_base 13: mod_base = OTHER; note = adenosine-3'-phosphate
  modified_base 14: mod_base = OTHER; note = guanosine-3'-phosphate
  modified_base 15: mod_base = OTHER; note = uridine-3'-phosphate
  modified_base 16: mod_base = OTHER; note = uridine-3'-phosphate
  modified_base 17: mod_base = OTHER; note = guanosine-3'-phosphate
  modified_base 18: mod_base = OTHER; note = adenosine-3'-phosphate
  modified_base 19: mod_base = OTHER; note = uridine-3'-phosphate
  misc_feature 1..19: note = RNA
  misc_feature 20..21: note = DNA
taatcagtgaatagttgattt

SEQ ID NO: 2767 - DNA, 21 bp, synthetic construct
  source 1..21: mol_type = other DNA
  modified_base 1: mod_base = OTHER; note = uridine-3'-phosphate
  modified_base 2: mod_base = OTHER; note = uridine-3'-phosphate
  modified_base 3: mod_base = OTHER; note = uridine-3'-phosphate
  modified_base 4: mod_base = OTHER; note = guanosine-3'-phosphate
  modified_base 5: mod_base = OTHER; note = adenosine-3'-phosphate
  modified_base 6: mod_base = OTHER; note = uridine-3'-phosphate
  modified_base 7: mod_base = OTHER; note = uridine-3'-phosphate
  modified_base 8: mod_base = OTHER; note = uridine-3'-phosphate
  modified_base 9: mod_base = OTHER; note = guanosine-3'-phosphate
  modified_base 10: mod_base = OTHER; note = guanosine-3'-phosphate
  modified_base 11: mod_base = OTHER; note = uridine-3'-phosphate
  modified_base 12: mod_base = OTHER; note = adenosine-3'-phosphate
  modified_base 13: mod_base = OTHER; note = adenosine-3'-phosphate
  modified_base 14: mod_base = OTHER; note = uridine-3'-phosphate
  modified_base 15: mod_base = OTHER; note = cytidine-3'-phosphate
  modified_base 16: mod_base = OTHER; note = adenosine-3'-phosphate
  modified_base 17: mod_base = OTHER; note = guanosine-3'-phosphate
  modified_base 18: mod_base = OTHER; note = uridine-3'-phosphate
  modified_base 19: mod_base = OTHER; note = guanosine-3'-phosphate
  misc_feature 1..19: note = RNA
  misc_feature 20..21: note = DNA
tttgatttggtaatcagtgtt

SEQ ID NO: 2768 - DNA, 21 bp, synthetic construct
  source 1..21: mol_type = other DNA
  modified_base 1: mod_base = OTHER; note = uridine-3'-phosphate
  modified_base 2: mod_base = OTHER; note = adenosine-3'-phosphate
  modified_base 3: mod_base = OTHER; note = adenosine-3'-phosphate
  modified_base 4: mod_base = OTHER; note = cytidine-3'-phosphate
  modified_base 5: mod_base = OTHER; note = adenosine-3'-phosphate
  modified_base 6: mod_base = OTHER; note = uridine-3'-phosphate
  modified_base 7: mod_base = OTHER; note = guanosine-3'-phosphate
  modified_base 8: mod_base = OTHER; note = uridine-3'-phosphate
  modified_base 9: mod_base = OTHER; note = cytidine-3'-phosphate
  modified_base 10: mod_base = OTHER; note = cytidine-3'-phosphate
  modified_base 11: mod_base = OTHER; note = adenosine-3'-phosphate
  modified_base 12: mod_base = OTHER; note = uridine-3'-phosphate
  modified_base 13: mod_base = OTHER; note = cytidine-3'-phosphate
  modified_base 14: mod_base = OTHER; note = uridine-3'-phosphate
  modified_base 15: mod_base = OTHER; note = uridine-3'-phosphate
  modified_base 16: mod_base = OTHER; note = uridine-3'-phosphate
  modified_base 17: mod_base = OTHER; note = guanosine-3'-phosphate
  modified_base 18: mod_base = OTHER; note = adenosine-3'-phosphate
  modified_base 19: mod_base = OTHER; note = uridine-3'-phosphate
  misc_feature 1..19: note = RNA
  misc_feature 20..21: note = DNA
taacatgtccatctttgattt

SEQ ID NO: 2769 - DNA, 21 bp, synthetic construct
  source 1..21: mol_type = other DNA
  modified_base 1: mod_base = OTHER; note = guanosine-3'-phosphate
  modified_base 2: mod_base = OTHER; note = uridine-3'-phosphate
  modified_base 3: mod_base = OTHER; note = uridine-3'-phosphate
  modified_base 4: mod_base = OTHER; note = guanosine-3'-phosphate
  modified_base 5: mod_base = OTHER; note = cytidine-3'-phosphate
  modified_base 6: mod_base = OTHER; note = adenosine-3'-phosphate
  modified_base 7: mod_base = OTHER; note = guanosine-3'-phosphate
  modified_base 8: mod_base = OTHER; note = adenosine-3'-phosphate
  modified_base 9: mod_base = OTHER; note = adenosine-3'-phosphate
  modified_base 10: mod_base = OTHER; note = uridine-3'-phosphate
  modified_base 11: mod_base = OTHER; note = adenosine-3'-phosphate
  modified_base 12: mod_base = OTHER; note = adenosine-3'-phosphate
  modified_base 13: mod_base = OTHER; note = cytidine-3'-phosphate
  modified_base 14: mod_base = OTHER; note = adenosine-3'-phosphate
  modified_base 15: mod_base = OTHER; note = uridine-3'-phosphate
  modified_base 16: mod_base = OTHER; note = guanosine-3'-phosphate
  modified_base 17: mod_base = OTHER; note = uridine-3'-phosphate
  modified_base 18: mod_base = OTHER; note = cytidine-3'-phosphate
  modified_base 19: mod_base = OTHER; note = cytidine-3'-phosphate
  misc_feature 1..19: note = RNA
  misc_feature 20..21: note = DNA
gttgcagaataacatgtcctt

SEQ ID NO: 2770 - DNA, 21 bp, synthetic construct
  source 1..21: mol_type = other DNA
  modified_base 1: mod_base = OTHER; note = adenosine-3'-phosphate
  modified_base 2: mod_base = OTHER; note = adenosine-3'-phosphate
  modified_base 3: mod_base = OTHER; note = uridine-3'-phosphate
  modified_base 4: mod_base = OTHER; note = cytidine-3'-phosphate
  modified_base 5: mod_base = OTHER; note = guanosine-3'-phosphate
  modified_base 6: mod_base = OTHER; note = adenosine-3'-phosphate
  modified_base 7: mod_base = OTHER; note = adenosine-3'-phosphate
  modified_base 8: mod_base = OTHER; note = uridine-3'-phosphate
  modified_base 9: mod_base = OTHER; note = uridine-3'-phosphate
  modified_base 10: mod_base = OTHER; note = cytidine-3'-phosphate
  modified_base 11: mod_base = OTHER; note = adenosine-3'-phosphate
  modified_base 12: mod_base = OTHER; note = guanosine-3'-phosphate
  modified_base 13: mod_base = OTHER; note = uridine-3'-phosphate
  modified_base 14: mod_base = OTHER; note = uridine-3'-phosphate
  modified_base 15: mod_base = OTHER; note = guanosine-3'-phosphate
  modified_base 16: mod_base = OTHER; note = cytidine-3'-phosphate
  modified_base 17: mod_base = OTHER; note = adenosine-3'-phosphate
  modified_base 18: mod_base = OTHER; note = guanosine-3'-phosphate
  modified_base 19: mod_base = OTHER; note = adenosine-3'-phosphate
  misc_feature 1..19: note = RNA
  misc_feature 20..21: note = DNA
aatcgaattcagttgcagatt

SEQ ID NO: 2771 - DNA, 21 bp, synthetic construct
  source 1..21: mol_type = other DNA
  modified_base 1: mod_base = OTHER; note = adenosine-3'-phosphate
  modified_base 2: mod_base = OTHER; note = cytidine-3'-phosphate
  modified_base 3: mod_base = OTHER; note = uridine-3'-phosphate
  modified_base 4: mod_base = OTHER; note = guanosine-3'-phosphate
  modified_base 5: mod_base = OTHER; note = guanosine-3'-phosphate
  modified_base 6: mod_base = OTHER; note = adenosine-3'-phosphate
  modified_base 7: mod_base = OTHER; note = guanosine-3'-phosphate
  modified_base 8: mod_base = OTHER; note = guanosine-3'-phosphate
  modified_base 9: mod_base = OTHER; note = guanosine-3'-phosphate
  modified_base 10: mod_base = OTHER; note = adenosine-3'-phosphate
  modified_base 11: mod_base = OTHER; note = adenosine-3'-phosphate
  modified_base 12: mod_base = OTHER; note = uridine-3'-phosphate
  modified_base 13: mod_base = OTHER; note = cytidine-3'-phosphate
  modified_base 14: mod_base = OTHER; note = guanosine-3'-phosphate
  modified_base 15: mod_base = OTHER; note = adenosine-3'-phosphate
  modified_base 16: mod_base = OTHER; note = adenosine-3'-phosphate
  modified_base 17: mod_base = OTHER; note = uridine-3'-phosphate
  modified_base 18: mod_base = OTHER; note = uridine-3'-phosphate
  modified_base 19: mod_base = OTHER; note = cytidine-3'-phosphate
  misc_feature 1..19: note = RNA
  misc_feature 20..21: note = DNA
actggagggaatcgaattctt

SEQ ID NO: 2772 - DNA, 21 bp, synthetic construct
  source 1..21: mol_type = other DNA
  modified_base 1: mod_base = OTHER; note = adenosine-3'-phosphate
  modified_base 2: mod_base = OTHER; note = adenosine-3'-phosphate
  modified_base 3: mod_base = OTHER; note = adenosine-3'-phosphate
  modified_base 4: mod_base = OTHER; note = guanosine-3'-phosphate
  modified_base 5: mod_base = OTHER; note = guanosine-3'-phosphate
  modified_base 6: mod_base = OTHER; note = adenosine-3'-phosphate
  modified_base 7: mod_base = OTHER; note = adenosine-3'-phosphate
  modified_base 8: mod_base = OTHER; note = adenosine-3'-phosphate
  modified_base 9: mod_base = OTHER; note = uridine-3'-phosphate
  modified_base 10: mod_base = OTHER; note = cytidine-3'-phosphate
  modified_base 11: mod_base = OTHER; note = adenosine-3'-phosphate
  modified_base 12: mod_base = OTHER; note = cytidine-3'-phosphate
  modified_base 13: mod_base = OTHER; note = uridine-3'-phosphate
  modified_base 14: mod_base = OTHER; note = guanosine-3'-phosphate
  modified_base 15: mod_base = OTHER; note = guanosine-3'-phosphate
  modified_base 16: mod_base = OTHER; note = adenosine-3'-phosphate
  modified_base 17: mod_base = OTHER; note = guanosine-3'-phosphate
  modified_base 18: mod_base = OTHER; note = guanosine-3'-phosphate
  modified_base 19: mod_base = OTHER; note = guanosine-3'-phosphate
  misc_feature 1..19: note = RNA
  misc_feature 20..21: note = DNA
aaaggaaatcactggagggtt

SEQ ID NO: 2773 - DNA, 21 bp, synthetic construct
  source 1..21: mol_type = other DNA
  modified_base 1: mod_base = OTHER; note = adenosine-3'-phosphate
  modified_base 2: mod_base = OTHER; note = uridine-3'-phosphate
  modified_base 3: mod_base = OTHER; note = cytidine-3'-phosphate
  modified_base 4: mod_base = OTHER; note = guanosine-3'-phosphate
  modified_base 5: mod_base = OTHER; note = uridine-3'-phosphate
  modified_base 6: mod_base = OTHER; note = adenosine-3'-phosphate
  modified_base 7: mod_base = OTHER; note = cytidine-3'-phosphate
  modified_base 8: mod_base = OTHER; note = adenosine-3'-phosphate
  modified_base 9: mod_base = OTHER; note = cytidine-3'-phosphate
  modified_base 10: mod_base = OTHER; note = adenosine-3'-phosphate
  modified_base 11: mod_base = OTHER; note = adenosine-3'-phosphate
  modified_base 12: mod_base = OTHER; note = adenosine-3'-phosphate
  modified_base 13: mod_base = OTHER; note = guanosine-3'-phosphate
  modified_base 14: mod_base = OTHER; note = guanosine-3'-phosphate
  modified_base 15: mod_base = OTHER; note = adenosine-3'-phosphate
  modified_base 16: mod_base = OTHER; note = adenosine-3'-phosphate
  modified_base 17: mod_base = OTHER; note = adenosine-3'-phosphate
  modified_base 18: mod_base = OTHER; note = uridine-3'-phosphate
  modified_base 19: mod_base = OTHER; note = cytidine-3'-phosphate
  misc_feature 1..19: note = RNA
  misc_feature 20..21: note = DNA
atcgtacacaaaggaaatctt

SEQ ID NO: 2774 - DNA, 21 bp, synthetic construct
  source 1..21: mol_type = other DNA
  modified_base 1: mod_base = OTHER; note = cytidine-3'-phosphate
  modified_base 2: mod_base = OTHER; note = adenosine-3'-phosphate
  modified_base 3: mod_base = OTHER; note = adenosine-3'-phosphate
  modified_base 4: mod_base = OTHER; note = adenosine-3'-phosphate
  modified_base 5: mod_base = OTHER; note = uridine-3'-phosphate
  modified_base 6: mod_base = OTHER; note = adenosine-3'-phosphate
  modified_base 7: mod_base = OTHER; note = uridine-3'-phosphate
  modified_base 8: mod_base = OTHER; note = cytidine-3'-phosphate
  modified_base 9: mod_base = OTHER; note = cytidine-3'-phosphate
  modified_base 10: mod_base = OTHER; note = guanosine-3'-phosphate
  modified_base 11: mod_base = OTHER; note = guanosine-3'-phosphate
  modified_base 12: mod_base = OTHER; note = adenosine-3'-phosphate
  modified_base 13: mod_base = OTHER; note = adenosine-3'-phosphate
  modified_base 14: mod_base = OTHER; note = uridine-3'-phosphate
  modified_base 15: mod_base = OTHER; note = cytidine-3'-phosphate
  modified_base 16: mod_base = OTHER; note = guanosine-3'-phosphate
  modified_base 17: mod_base = OTHER; note = uridine-3'-phosphate
  modified_base 18: mod_base = OTHER; note = adenosine-3'-phosphate
  modified_base 19: mod_base = OTHER; note = cytidine-3'-phosphate
  misc_feature 1..19: note = RNA
  misc_feature 20..21: note = DNA
caaatatccggaatcgtactt

SEQ ID NO: 2775 - DNA, 21 bp, synthetic construct
  source 1..21: mol_type = other DNA
  modified_base 1: mod_base = OTHER; note = cytidine-3'-phosphate
  modified_base 2: mod_base = OTHER; note = adenosine-3'-phosphate
  modified_base 3: mod_base = OTHER; note = adenosine-3'-phosphate
  modified_base 4: mod_base = OTHER; note = adenosine-3'-phosphate
  modified_base 5: mod_base = OTHER; note = guanosine-3'-phosphate
  modified_base 6: mod_base = OTHER; note = adenosine-3'-phosphate
  modified_base 7: mod_base = OTHER; note = guanosine-3'-phosphate
  modified_base 8: mod_base = OTHER; note = uridine-3'-phosphate
  modified_base 9: mod_base = OTHER; note = uridine-3'-phosphate
  modified_base 10: mod_base = OTHER; note = cytidine-3'-phosphate
  modified_base 11: mod_base = OTHER; note = adenosine-3'-phosphate
  modified_base 12: mod_base = OTHER; note = adenosine-3'-phosphate
  modified_base 13: mod_base = OTHER; note = adenosine-3'-phosphate
  modified_base 14: mod_base = OTHER; note = uridine-3'-phosphate
  modified_base 15: mod_base = OTHER; note = adenosine-3'-phosphate
  modified_base 16: mod_base = OTHER; note = uridine-3'-phosphate
  modified_base 17: mod_base = OTHER; note = cytidine-3'-phosphate
  modified_base 18: mod_base = OTHER; note = cytidine-3'-phosphate
  modified_base 19: mod_base = OTHER; note = guanosine-3'-phosphate
  misc_feature 1..19: note = RNA
  misc_feature 20..21: note = DNA
caaagagttcaaatatccgtt

SEQ ID NO: 2776 - DNA, 21 bp, synthetic construct
  source 1..21: mol_type = other DNA
  modified_base 1: mod_base = OTHER; note = adenosine-3'-phosphate
  modified_base 2: mod_base = OTHER; note = adenosine-3'-phosphate
  modified_base 3: mod_base = OTHER; note = adenosine-3'-phosphate
  modified_base 4: mod_base = OTHER; note = cytidine-3'-phosphate
  modified_base 5: mod_base = OTHER; note = cytidine-3'-phosphate
  modified_base 6: mod_base = OTHER; note = cytidine-3'-phosphate
  modified_base 7: mod_base = OTHER; note = adenosine-3'-phosphate
  modified_base 8: mod_base = OTHER; note = adenosine-3'-phosphate
  modified_base 9: mod_base = OTHER; note = cytidine-3'-phosphate
  modified_base 10: mod_base = OTHER; note = uridine-3'-phosphate
  modified_base 11: mod_base = OTHER; note = uridine-3'-phosphate
  modified_base 12: mod_base = OTHER; note = cytidine-3'-phosphate
  modified_base 13: mod_base = OTHER; note = adenosine-3'-phosphate
  modified_base 14: mod_base = OTHER; note = adenosine-3'-phosphate
  modified_base 15: mod_base = OTHER; note = adenosine-3'-phosphate
  modified_base 16: mod_base = OTHER; note = guanosine-3'-phosphate
  modified_base 17: mod_base = OTHER; note = adenosine-3'-phosphate
  modified_base 18: mod_base = OTHER; note = guanosine-3'-phosphate
  modified_base 19: mod_base = OTHER; note = uridine-3'-phosphate
  misc_feature 1..19: note = RNA
  misc_feature 20..21: note = DNA
aaacccaacttcaaagagttt

SEQ ID NO: 2777 - DNA, 21 bp, synthetic construct
  source 1..21: mol_type = other DNA
  modified_base 1: mod_base = OTHER; note = adenosine-3'-phosphate
  modified_base 2: mod_base = OTHER; note = guanosine-3'-phosphate
  modified_base 3: mod_base = OTHER; note = guanosine-3'-phosphate
  modified_base 4: mod_base = OTHER; note = adenosine-3'-phosphate
  modified_base 5: mod_base = OTHER; note = cytidine-3'-phosphate
  modified_base 6: mod_base = OTHER; note = uridine-3'-phosphate
  modified_base 7: mod_base = OTHER; note = guanosine-3'-phosphate
  modified_base 8: mod_base = OTHER; note = adenosine-3'-phosphate
  modified_base 9: mod_base = OTHER; note = guanosine-3'-phosphate
  modified_base 10: mod_base = OTHER; note = adenosine-3'-phosphate
  modified_base 11: mod_base = OTHER; note = adenosine-3'-phosphate
  modified_base 12: mod_base = OTHER; note = adenosine-3'-phosphate
  modified_base 13: mod_base = OTHER; note = cytidine-3'-phosphate
  modified_base 14: mod_base = OTHER; note = cytidine-3'-phosphate
  modified_base 15: mod_base = OTHER; note = cytidine-3'-phosphate
  modified_base 16: mod_base = OTHER; note = adenosine-3'-phosphate
  modified_base 17: mod_base = OTHER; note = adenosine-3'-phosphate
  modified_base 18: mod_base = OTHER; note = cytidine-3'-phosphate
  modified_base 19: mod_base = OTHER; note = uridine-3'-phosphate
  misc_feature 1..19: note = RNA
  misc_feature 20..21: note = DNA
aggactgagaaacccaacttt

SEQ ID NO: 2778 - DNA, 21 bp, synthetic construct
  source 1..21: mol_type = other DNA
  modified_base 1: mod_base = OTHER; note = adenosine-3'-phosphate
  modified_base 2: mod_base = OTHER; note = adenosine-3'-phosphate
  modified_base 3: mod_base = OTHER; note = adenosine-3'-phosphate
  modified_base 4: mod_base = OTHER; note = guanosine-3'-phosphate
  modified_base 5: mod_base = OTHER; note = uridine-3'-phosphate
  modified_base 6: mod_base = OTHER; note = guanosine-3'-phosphate
  modified_base 7: mod_base = OTHER; note = guanosine-3'-phosphate
  modified_base 8: mod_base = OTHER; note = cytidine-3'-phosphate
  modified_base 9: mod_base = OTHER; note = adenosine-3'-phosphate
  modified_base 10: mod_base = OTHER; note = guanosine-3'-phosphate
  modified_base 11: mod_base = OTHER; note = guanosine-3'-phosphate
  modified_base 12: mod_base = OTHER; note = adenosine-3'-phosphate
  modified_base 13: mod_base = OTHER; note = cytidine-3'-phosphate
  modified_base 14: mod_base = OTHER; note = uridine-3'-phosphate
  modified_base 15: mod_base = OTHER; note = guanosine-3'-phosphate
  modified_base 16: mod_base = OTHER; note = adenosine-3'-phosphate
  modified_base 17: mod_base = OTHER; note = guanosine-3'-phosphate
  modified_base 18: mod_base = OTHER; note = adenosine-3'-phosphate
  modified_base 19: mod_base = OTHER; note = adenosine-3'-phosphate
  misc_feature 1..19: note = RNA
  misc_feature 20..21: note = DNA
aaagtggcaggactgagaatt

SEQ ID NO: 2779 - DNA, 21 bp, synthetic construct
  source 1..21: mol_type = other DNA
  modified_base 1: mod_base = OTHER; note = uridine-3'-phosphate
  modified_base 2: mod_base = OTHER; note = uridine-3'-phosphate
  modified_base 3: mod_base = OTHER; note = cytidine-3'-phosphate
  modified_base 4: mod_base = OTHER; note = guanosine-3'-phosphate
  modified_base 5: mod_base = OTHER; note = uridine-3'-phosphate
  modified_base 6: mod_base = OTHER; note = adenosine-3'-phosphate
  modified_base 7: mod_base = OTHER; note = cytidine-3'-phosphate
  modified_base 8: mod_base = OTHER; note = adenosine-3'-phosphate
  modified_base 9: mod_base = OTHER; note = cytidine-3'-phosphate
  modified_base 10: mod_base = OTHER; note = uridine-3'-phosphate
  modified_base 11: mod_base = OTHER; note = guanosine-3'-phosphate
  modified_base 12: mod_base = OTHER; note = uridine-3'-phosphate
  modified_base 13: mod_base = OTHER; note = guanosine-3'-phosphate
  modified_base 14: mod_base = OTHER; note = adenosine-3'-phosphate
  modified_base 15: mod_base = OTHER; note = adenosine-3'-phosphate
  modified_base 16: mod_base = OTHER; note = adenosine-3'-phosphate
  modified_base 17: mod_base = OTHER; note = guanosine-3'-phosphate
  modified_base 18: mod_base = OTHER; note = uridine-3'-phosphate
  modified_base 19: mod_base = OTHER; note = guanosine-3'-phosphate
  misc_feature 1..19: note = RNA
  misc_feature 20..21: note = DNA
ttcgtacactgtgaaagtgtt

SEQ ID NO: 2780 - DNA, 21 bp, synthetic construct
  source 1..21: mol_type = other DNA
  modified_base 1: mod_base = OTHER; note = guanosine-3'-phosphate
  modified_base 2: mod_base = OTHER; note = uridine-3'-phosphate
  modified_base 3: mod_base = OTHER; note = guanosine-3'-phosphate
  modified_base 4: mod_base = OTHER; note = guanosine-3'-phosphate
  modified_base 5: mod_base = OTHER; note = uridine-3'-phosphate
  modified_base 6: mod_base = OTHER; note = adenosine-3'-phosphate
  modified_base 7: mod_base = OTHER; note = uridine-3'-phosphate
  modified_base 8: mod_base = OTHER; note = uridine-3'-phosphate
  modified_base 9: mod_base = OTHER; note = cytidine-3'-phosphate
  modified_base 10: mod_base = OTHER; note = guanosine-3'-phosphate
  modified_base 11: mod_base = OTHER; note = uridine-3'-phosphate
  modified_base 12: mod_base = OTHER; note = adenosine-3'-phosphate
  modified_base 13: mod_base = OTHER; note = cytidine-3'-phosphate
  modified_base 14: mod_base = OTHER; note = adenosine-3'-phosphate
  modified_base 15: mod_base = OTHER; note = cytidine-3'-phosphate
  modified_base 16: mod_base = OTHER; note = uridine-3'-phosphate
  modified_base 17: mod_base = OTHER; note = guanosine-3'-phosphate
  modified_base 18: mod_base = OTHER; note = uridine-3'-phosphate
  modified_base 19: mod_base = OTHER; note = guanosine-3'-phosphate
  misc_feature 1..19: note = RNA
  misc_feature 20..21: note = DNA
gtggtattcgtacactgtgtt

SEQ ID NO: 2781 - DNA, 21 bp, synthetic construct
  source 1..21: mol_type = other DNA
  modified_base 1: mod_base = OTHER; note = uridine-3'-phosphate
  modified_base 2: mod_base = OTHER; note = guanosine-3'-phosphate
  modified_base 3: mod_base = OTHER; note = uridine-3'-phosphate
  modified_base 4: mod_base = OTHER; note = uridine-3'-phosphate
  modified_base 5: mod_base = OTHER; note = uridine-3'-phosphate
  modified_base 6: mod_base = OTHER; note = adenosine-3'-phosphate
  modified_base 7: mod_base = OTHER; note = uridine-3'-phosphate
  modified_base 8: mod_base = OTHER; note = cytidine-3'-phosphate
  modified_base 9: mod_base = OTHER; note = uridine-3'-phosphate
  modified_base 10: mod_base = OTHER; note = guanosine-3'-phosphate
  modified_base 11: mod_base = OTHER; note = guanosine-3'-phosphate
  modified_base 12: mod_base = OTHER; note = uridine-3'-phosphate
  modified_base 13: mod_base = OTHER; note = cytidine-3'-phosphate
  modified_base 14: mod_base = OTHER; note = uridine-3'-phosphate
  modified_base 15: mod_base = OTHER; note = guanosine-3'-phosphate
  modified_base 16: mod_base = OTHER; note = uridine-3'-phosphate
  modified_base 17: mod_base = OTHER; note = guanosine-3'-phosphate
  modified_base 18: mod_base = OTHER; note = guanosine-3'-phosphate
  modified_base 19: mod_base = OTHER; note = uridine-3'-phosphate
  misc_feature 1..19: note = RNA
  misc_feature 20..21: note = DNA
tgtttatctggtctgtggttt

SEQ ID NO: 2782 - DNA, 21 bp, synthetic construct
  source 1..21: mol_type = other DNA
  modified_base 1: mod_base = OTHER; note = uridine-3'-phosphate
  modified_base 2: mod_base = OTHER; note = guanosine-3'-phosphate
  modified_base 3: mod_base = OTHER; note = guanosine-3'-phosphate
  modified_base 4: mod_base = OTHER; note = uridine-3'-phosphate
  modified_base 5: mod_base = OTHER; note = adenosine-3'-phosphate
  modified_base 6: mod_base = OTHER; note = cytidine-3'-phosphate
  modified_base 7: mod_base = OTHER; note = adenosine-3'-phosphate
  modified_base 8: mod_base = OTHER; note = cytidine-3'-phosphate
  modified_base 9: mod_base = OTHER; note = uridine-3'-phosphate
  modified_base 10: mod_base = OTHER; note = guanosine-3'-phosphate
  modified_base 11: mod_base = OTHER; note = uridine-3'-phosphate
  modified_base 12: mod_base = OTHER; note = uridine-3'-phosphate
  modified_base 13: mod_base = OTHER; note = uridine-3'-phosphate
  modified_base 14: mod_base = OTHER; note = adenosine-3'-phosphate
  modified_base 15: mod_base = OTHER; note = uridine-3'-phosphate
  modified_base 16: mod_base = OTHER; note = cytidine-3'-phosphate
  modified_base 17: mod_base = OTHER; note = uridine-3'-phosphate
  modified_base 18: mod_base = OTHER; note = guanosine-3'-phosphate
  modified_base 19: mod_base = OTHER; note = guanosine-3'-phosphate
  misc_feature 1..19: note = RNA
  misc_feature 20..21: note = DNA
tggtacactgtttatctggtt

SEQ ID NO: 2783 - DNA, 21 bp, synthetic construct
  source 1..21: mol_type = other DNA
  modified_base 1: mod_base = OTHER; note = uridine-3'-phosphate
  modified_base 2: mod_base = OTHER; note = adenosine-3'-phosphate
  modified_base 3: mod_base = OTHER; note = uridine-3'-phosphate
  modified_base 4: mod_base = OTHER; note = adenosine-3'-phosphate
  modified_base 5: mod_base = OTHER; note = adenosine-3'-phosphate
  modified_base 6: mod_base = OTHER; note = adenosine-3'-phosphate
  modified_base 7: mod_base = OTHER; note = adenosine-3'-phosphate
  modified_base 8: mod_base = OTHER; note = cytidine-3'-phosphate
  modified_base 9: mod_base = OTHER; note = adenosine-3'-phosphate
  modified_base 10: mod_base = OTHER; note = uridine-3'-phosphate
  modified_base 11: mod_base = OTHER; note = guanosine-3'-phosphate
  modified_base 12: mod_base = OTHER; note = guanosine-3'-phosphate
  modified_base 13: mod_base = OTHER; note = uridine-3'-phosphate
  modified_base 14: mod_base = OTHER; note = adenosine-3'-phosphate
  modified_base 15: mod_base = OTHER; note = cytidine-3'-phosphate
  modified_base 16: mod_base = OTHER; note = adenosine-3'-phosphate
  modified_base 17: mod_base = OTHER; note = cytidine-3'-phosphate
  modified_base 18: mod_base = OTHER; note = uridine-3'-phosphate
  modified_base 19: mod_base = OTHER; note = guanosine-3'-phosphate
  misc_feature 1..19: note = RNA
  misc_feature 20..21: note = DNA
tataaaacatggtacactgtt

SEQ ID NO: 2784 - DNA, 21 bp, synthetic construct
  source 1..21: mol_type = other DNA
  modified_base 1: mod_base = OTHER; note = adenosine-3'-phosphate
  modified_base 2: mod_base = OTHER; note = uridine-3'-phosphate
  modified_base 3: mod_base = OTHER; note = uridine-3'-phosphate
  modified_base 4: mod_base = OTHER; note = guanosine-3'-phosphate
  modified_base 5: mod_base = OTHER; note = guanosine-3'-phosphate
  modified_base 6: mod_base = OTHER; note = adenosine-3'-phosphate
  modified_base 7: mod_base = OTHER; note = adenosine-3'-phosphate
  modified_base 8: mod_base = OTHER; note = guanosine-3'-phosphate
  modified_base 9: mod_base = OTHER; note = uridine-3'-phosphate
  modified_base 10: mod_base = OTHER; note = guanosine-3'-phosphate
  modified_base 11: mod_base = OTHER; note = cytidine-3'-phosphate
  modified_base 12: mod_base = OTHER; note = uridine-3'-phosphate
  modified_base 13: mod_base = OTHER; note = adenosine-3'-phosphate
  modified_base 14: mod_base = OTHER; note = uridine-3'-phosphate
  modified_base 15: mod_base = OTHER; note = adenosine-3'-phosphate
  modified_base 16: mod_base = OTHER; note = adenosine-3'-phosphate
  modified_base 17: mod_base = OTHER; note = adenosine-3'-phosphate
  modified_base 18: mod_base = OTHER; note = adenosine-3'-phosphate
  modified_base 19: mod_base = OTHER; note = cytidine-3'-phosphate
  misc_feature 1..19: note = RNA
  misc_feature 20..21: note = DNA
attggaagtgctataaaactt

SEQ ID NO: 2785 - DNA, 21 bp, synthetic construct
  source 1..21: mol_type = other DNA
  modified_base 1: mod_base = OTHER; note = uridine-3'-phosphate
  modified_base 2: mod_base = OTHER; note = guanosine-3'-phosphate
  modified_base 3: mod_base = OTHER; note = adenosine-3'-phosphate
  modified_base 4: mod_base = OTHER; note = adenosine-3'-phosphate
  modified_base 5: mod_base = OTHER; note = uridine-3'-phosphate
  modified_base 6: mod_base = OTHER; note = uridine-3'-phosphate
  modified_base 7: mod_base = OTHER; note = uridine-3'-phosphate
  modified_base 8: mod_base = OTHER; note = uridine-3'-phosphate
  modified_base 9: mod_base = OTHER; note = guanosine-3'-phosphate
  modified_base 10: mod_base = OTHER; note = adenosine-3'-phosphate
  modified_base 11: mod_base = OTHER; note = uridine-3'-phosphate
  modified_base 12: mod_base = OTHER; note = adenosine-3'-phosphate
  modified_base 13: mod_base = OTHER; note = uridine-3'-phosphate
  modified_base 14: mod_base = OTHER; note = uridine-3'-phosphate
  modified_base 15: mod_base = OTHER; note = guanosine-3'-phosphate
  modified_base 16: mod_base = OTHER; note = guanosine-3'-phosphate
  modified_base 17: mod_base = OTHER; note = adenosine-3'-phosphate
  modified_base 18: mod_base = OTHER; note = adenosine-3'-phosphate
  modified_base 19: mod_base = OTHER; note = guanosine-3'-phosphate
  misc_feature 1..19: note = RNA
  misc_feature 20..21: note = DNA
tgaattttgatattggaagtt

SEQ ID NO: 2786 - DNA, 21 bp, synthetic construct
  source 1..21: mol_type = other DNA
  modified_base 1: mod_base = OTHER; note = adenosine-3'-phosphate
  modified_base 2: mod_base = OTHER; note = guanosine-3'-phosphate
  modified_base 3: mod_base = OTHER; note = adenosine-3'-phosphate
  modified_base 4: mod_base = OTHER; note = cytidine-3'-phosphate
  modified_base 5: mod_base = OTHER; note = uridine-3'-phosphate
  modified_base 6: mod_base = OTHER; note = uridine-3'-phosphate
  modified_base 7: mod_base = OTHER; note = uridine-3'-phosphate
  modified_base 8: mod_base = OTHER; note = cytidine-3'-phosphate
  modified_base 9: mod_base = OTHER; note = uridine-3'-phosphate
  modified_base 10: mod_base = OTHER; note = guanosine-3'-phosphate
  modified_base 11: mod_base = OTHER; note = adenosine-3'-phosphate
  modified_base 12: mod_base = OTHER; note = adenosine-3'-phosphate
  modified_base 13: mod_base = OTHER; note = uridine-3'-phosphate
  modified_base 14: mod_base = OTHER; note = uridine-3'-phosphate
  modified_base 15: mod_base = OTHER; note = uridine-3'-phosphate
  modified_base 16: mod_base = OTHER; note = uridine-3'-phosphate
  modified_base 17: mod_base = OTHER; note = guanosine-3'-phosphate
  modified_base 18: mod_base = OTHER; note = adenosine-3'-phosphate
  modified_base 19: mod_base = OTHER; note = uridine-3'-phosphate
  misc_feature 1..19: note = RNA
  misc_feature 20..21: note = DNA
agactttctgaattttgattt

SEQ ID NO: 2787 - DNA, 21 bp, synthetic construct
  source 1..21: mol_type = other DNA
  modified_base 1: mod_base = OTHER; note = guanosine-3'-phosphate
  modified_base 2: mod_base = OTHER; note = guanosine-3'-phosphate
  modified_base 3: mod_base = OTHER; note = cytidine-3'-phosphate
  modified_base 4: mod_base = OTHER; note = uridine-3'-phosphate
  modified_base 5: mod_base = OTHER; note = cytidine-3'-phosphate
  modified_base 6: mod_base = OTHER; note = cytidine-3'-phosphate
  modified_base 7: mod_base = OTHER; note = uridine-3'-phosphate
  modified_base 8: mod_base = OTHER; note = uridine-3'-phosphate
  modified_base 9: mod_base = OTHER; note = cytidine-3'-phosphate
  modified_base 10: mod_base = OTHER; note = adenosine-3'-phosphate
  modified_base 11: mod_base = OTHER; note = cytidine-3'-phosphate
  modified_base 12: mod_base = OTHER; note = adenosine-3'-phosphate
  modified_base 13: mod_base = OTHER; note = guanosine-3'-phosphate
  modified_base 14: mod_base = OTHER; note = adenosine-3'-phosphate
  modified_base 15: mod_base = OTHER; note = cytidine-3'-phosphate
  modified_base 16: mod_base = OTHER; note = uridine-3'-phosphate
  modified_base 17: mod_base = OTHER; note = uridine-3'-phosphate
  modified_base 18: mod_base = OTHER; note = uridine-3'-phosphate
  modified_base 19: mod_base = OTHER; note = cytidine-3'-phosphate
  misc_feature 1..19: note = RNA
  misc_feature 20..21: note = DNA
ggctccttcacagactttctt

SEQ ID NO: 2788 - DNA, 21 bp, synthetic construct
  source 1..21: mol_type = other DNA
  modified_base 1: mod_base = OTHER; note = adenosine-3'-phosphate
  modified_base 2: mod_base = OTHER; note = cytidine-3'-phosphate
  modified_base 3: mod_base = OTHER; note = uridine-3'-phosphate
  modified_base 4: mod_base = OTHER; note = uridine-3'-phosphate
  modified_base 5: mod_base = OTHER; note = guanosine-3'-phosphate
  modified_base 6: mod_base = OTHER; note = cytidine-3'-phosphate
  modified_base 7: mod_base = OTHER; note = adenosine-3'-phosphate
  modified_base 8: mod_base = OTHER; note = cytidine-3'-phosphate
  modified_base 9: mod_base = OTHER; note = guanosine-3'-phosphate
  modified_base 10: mod_base = OTHER; note = cytidine-3'-phosphate
  modified_base 11: mod_base = OTHER; note = guanosine-3'-phosphate
  modified_base 12: mod_base = OTHER; note = guanosine-3'-phosphate
  modified_base 13: mod_base = OTHER; note = cytidine-3'-phosphate
  modified_base 14: mod_base = OTHER; note = uridine-3'-phosphate
  modified_base 15: mod_base = OTHER; note = cytidine-3'-phosphate
  modified_base 16: mod_base = OTHER; note = cytidine-3'-phosphate
  modified_base 17: mod_base = OTHER; note = uridine-3'-phosphate
  modified_base 18: mod_base = OTHER; note = uridine-3'-phosphate
  modified_base 19: mod_base = OTHER; note = cytidine-3'-phosphate
  misc_feature 1..19: note = RNA
  misc_feature 20..21: note = DNA
acttgcacgcggctccttctt

SEQ ID NO: 2789 - DNA, 21 bp, synthetic construct
  source 1..21: mol_type = other DNA
  modified_base 1: mod_base = OTHER; note = guanosine-3'-phosphate
  modified_base 2: mod_base = OTHER; note = cytidine-3'-phosphate
  modified_base 3: mod_base = OTHER; note = uridine-3'-phosphate
  modified_base 4: mod_base = OTHER; note = uridine-3'-phosphate
  modified_base 5: mod_base = OTHER; note = cytidine-3'-phosphate
  modified_base 6: mod_base = OTHER; note = uridine-3'-phosphate
  modified_base 7: mod_base = OTHER; note = adenosine-3'-phosphate
  modified_base 8: mod_base = OTHER; note = cytidine-3'-phosphate
  modified_base 9: mod_base = OTHER; note = adenosine-3'-phosphate
  modified_base 10: mod_base = OTHER; note = cytidine-3'-phosphate
  modified_base 11: mod_base = OTHER; note = adenosine-3'-phosphate
  modified_base 12: mod_base = OTHER; note = cytidine-3'-phosphate
  modified_base 13: mod_base = OTHER; note = uridine-3'-phosphate
  modified_base 14: mod_base = OTHER; note = uridine-3'-phosphate
  modified_base 15: mod_base = OTHER; note = guanosine-3'-phosphate
  modified_base 16: mod_base = OTHER; note = cytidine-3'-phosphate
  modified_base 17: mod_base = OTHER; note = adenosine-3'-phosphate
  modified_base 18: mod_base = OTHER; note = cytidine-3'-phosphate
  modified_base 19: mod_base = OTHER; note = guanosine-3'-phosphate
  misc_feature 1..19: note = RNA
  misc_feature 20..21: note = DNA
gcttctacacacttgcacgtt

SEQ ID NO: 2790 - DNA, 21 bp, synthetic construct
  source 1..21: mol_type = other DNA
  modified_base 1: mod_base = OTHER; note = guanosine-3'-phosphate
  modified_base 2: mod_base = OTHER; note = cytidine-3'-phosphate
  modified_base 3: mod_base = OTHER; note = cytidine-3'-phosphate
  modified_base 4: mod_base = OTHER; note = cytidine-3'-phosphate
  modified_base 5: mod_base = OTHER; note = adenosine-3'-phosphate
  modified_base 6: mod_base = OTHER; note = cytidine-3'-phosphate
  modified_base 7: mod_base = OTHER; note = adenosine-3'-phosphate
  modified_base 8: mod_base = OTHER; note = adenosine-3'-phosphate
  modified_base 9: mod_base = OTHER; note = uridine-3'-phosphate
  modified_base 10: mod_base = OTHER; note = cytidine-3'-phosphate
  modified_base 11: mod_base = OTHER; note = adenosine-3'-phosphate
  modified_base 12: mod_base = OTHER; note = guanosine-3'-phosphate
  modified_base 13: mod_base = OTHER; note = cytidine-3'-phosphate
  modified_base 14: mod_base = OTHER; note = uridine-3'-phosphate
  modified_base 15: mod_base = OTHER; note = uridine-3'-phosphate
  modified_base 16: mod_base = OTHER; note = cytidine-3'-phosphate
  modified_base 17: mod_base = OTHER; note = uridine-3'-phosphate
  modified_base 18: mod_base = OTHER; note = adenosine-3'-phosphate
  modified_base 19: mod_base = OTHER; note = cytidine-3'-phosphate
  misc_feature 1..19: note = RNA
  misc_feature 20..21: note = DNA
gcccacaatcagcttctactt

SEQ ID NO: 2791 - DNA, 21 bp, synthetic construct
  source 1..21: mol_type = other DNA
  modified_base 1: mod_base = OTHER; note = uridine-3'-phosphate
  modified_base 2: mod_base = OTHER; note = guanosine-3'-phosphate
  modified_base 3: mod_base = OTHER; note = cytidine-3'-phosphate
  modified_base 4: mod_base = OTHER; note = adenosine-3'-phosphate
  modified_base 5: mod_base = OTHER; note = uridine-3'-phosphate
  modified_base 6: mod_base = OTHER; note = uridine-3'-phosphate
  modified_base 7: mod_base = OTHER; note = uridine-3'-phosphate
  modified_base 8: mod_base = OTHER; note = guanosine-3'-phosphate
  modified_base 9: mod_base = OTHER; note = cytidine-3'-phosphate
  modified_base 10: mod_base = OTHER; note = cytidine-3'-phosphate
  modified_base 11: mod_base = OTHER; note = cytidine-3'-phosphate
  modified_base 12: mod_base = OTHER; note = adenosine-3'-phosphate
  modified_base 13: mod_base = OTHER; note = cytidine-3'-phosphate
  modified_base 14: mod_base = OTHER; note = adenosine-3'-phosphate
  modified_base 15: mod_base = OTHER; note = adenosine-3'-phosphate
  modified_base 16: mod_base = OTHER; note = uridine-3'-phosphate
  modified_base 17: mod_base = OTHER; note = cytidine-3'-phosphate
  modified_base 18: mod_base = OTHER; note = adenosine-3'-phosphate
  modified_base 19: mod_base = OTHER; note = guanosine-3'-phosphate
  misc_feature 1..19: note = RNA
  misc_feature 20..21: note = DNA
tgcatttgcccacaatcagtt

SEQ ID NO: 2792 - DNA, 21 bp, synthetic construct
  source 1..21: mol_type = other DNA
  modified_base 1: mod_base = OTHER; note = cytidine-3'-phosphate
  modified_base 2: mod_base = OTHER; note = adenosine-3'-phosphate
  modified_base 3: mod_base = OTHER; note = adenosine-3'-phosphate
  modified_base 4: mod_base = OTHER; note = uridine-3'-phosphate
  modified_base 5: mod_base = OTHER; note = uridine-3'-phosphate
  modified_base 6: mod_base = OTHER; note = cytidine-3'-phosphate
  modified_base 7: mod_base = OTHER; note = uridine-3'-phosphate
  modified_base 8: mod_base = OTHER; note = uridine-3'-phosphate
  modified_base 9: mod_base = OTHER; note = cytidine-3'-phosphate
  modified_base 10: mod_base = OTHER; note = cytidine-3'-phosphate
  modified_base 11: mod_base = OTHER; note = uridine-3'-phosphate
  modified_base 12: mod_base = OTHER; note = guanosine-3'-phosphate
  modified_base 13: mod_base = OTHER; note = cytidine-3'-phosphate
  modified_base 14: mod_base = OTHER; note = adenosine-3'-phosphate
  modified_base 15: mod_base = OTHER; note = uridine-3'-phosphate
  modified_base 16: mod_base = OTHER; note = uridine-3'-phosphate
  modified_base 17: mod_base = OTHER; note = uridine-3'-phosphate
  modified_base 18: mod_base = OTHER; note = guanosine-3'-phosphate
  modified_base 19: mod_base = OTHER; note = cytidine-3'-phosphate
  misc_feature 1..19: note = RNA
  misc_feature 20..21: note = DNA
caattcttcctgcatttgctt

SEQ ID NO: 2793 - DNA, 21 bp, synthetic construct
  source 1..21: mol_type = other DNA
  modified_base 1: mod_base = OTHER; note = uridine-3'-phosphate
  modified_base 2: mod_base = OTHER; note = uridine-3'-phosphate
  modified_base 3: mod_base = OTHER; note = guanosine-3'-phosphate
  modified_base 4: mod_base = OTHER; note = uridine-3'-phosphate
  modified_base 5: mod_base = OTHER; note = cytidine-3'-phosphate
  modified_base 6: mod_base = OTHER; note = adenosine-3'-phosphate
  modified_base 7: mod_base = OTHER; note = guanosine-3'-phosphate
  modified_base 8: mod_base = OTHER; note = adenosine-3'-phosphate
  modified_base 9: mod_base = OTHER; note = uridine-3'-phosphate
  modified_base 10: mod_base = OTHER; note = cytidine-3'-phosphate
  modified_base 11: mod_base = OTHER; note = cytidine-3'-phosphate
  modified_base 12: mod_base = OTHER; note = adenosine-3'-phosphate
  modified_base 13: mod_base = OTHER; note = adenosine-3'-phosphate
  modified_base 14: mod_base = OTHER; note = uridine-3'-phosphate
  modified_base 15: mod_base = OTHER; note = uridine-3'-phosphate
  modified_base 16: mod_base = OTHER; note = cytidine-3'-phosphate
  modified_base 17: mod_base = OTHER; note = uridine-3'-phosphate
  modified_base 18: mod_base = OTHER; note = uridine-3'-phosphate
  modified_base 19: mod_base = OTHER; note = cytidine-3'-phosphate
  misc_feature 1..19: note = RNA
  misc_feature 20..21: note = DNA
ttgtcagatccaattcttctt

SEQ ID NO: 2794 - DNA, 21 bp, synthetic construct
  source 1..21: mol_type = other DNA
  modified_base 1: mod_base = OTHER; note = uridine-3'-phosphate
  modified_base 2: mod_base = OTHER; note = cytidine-3'-phosphate
  modified_base 3: mod_base = OTHER; note = uridine-3'-phosphate
  modified_base 4: mod_base = OTHER; note = cytidine-3'-phosphate
  modified_base 5: mod_base = OTHER; note = uridine-3'-phosphate
  modified_base 6: mod_base = OTHER; note = guanosine-3'-phosphate
  modified_base 7: mod_base = OTHER; note = cytidine-3'-phosphate
  modified_base 8: mod_base = OTHER; note = adenosine-3'-phosphate
  modified_base 9: mod_base = OTHER; note = guanosine-3'-phosphate
  modified_base 10: mod_base = OTHER; note = adenosine-3'-phosphate
  modified_base 11: mod_base = OTHER; note = guanosine-3'-phosphate
  modified_base 12: mod_base = OTHER; note = adenosine-3'-phosphate
  modified_base 13: mod_base = OTHER; note = uridine-3'-phosphate
  modified_base 14: mod_base = OTHER; note = uridine-3'-phosphate
  modified_base 15: mod_base = OTHER; note = guanosine-3'-phosphate
  modified_base 16: mod_base = OTHER; note = uridine-3'-phosphate
  modified_base 17: mod_base = OTHER; note = cytidine-3'-phosphate
  modified_base 18: mod_base = OTHER; note = adenosine-3'-phosphate
  modified_base 19: mod_base = OTHER; note = guanosine-3'-phosphate
  misc_feature 1..19: note = RNA
  misc_feature 20..21: note = DNA
tctctgcagagattgtcagtt

SEQ ID NO: 2795 - DNA, 21 bp, synthetic construct
  source 1..21: mol_type = other DNA
  modified_base 1: mod_base = OTHER; note = uridine-3'-phosphate
  modified_base 2: mod_base = OTHER; note = uridine-3'-phosphate
  modified_base 3: mod_base = OTHER; note = uridine-3'-phosphate
  modified_base 4: mod_base = OTHER; note = guanosine-3'-phosphate
  modified_base 5: mod_base = OTHER; note = uridine-3'-phosphate
  modified_base 6: mod_base = OTHER; note = uridine-3'-phosphate
  modified_base 7: mod_base = OTHER; note = uridine-3'-phosphate
  modified_base 8: mod_base = OTHER; note = uridine-3'-phosphate
  modified_base 9: mod_base = OTHER; note = cytidine-3'-phosphate
  modified_base 10: mod_base = OTHER; note = uridine-3'-phosphate
  modified_base 11: mod_base = OTHER; note = uridine-3'-phosphate
  modified_base 12: mod_base = OTHER; note = guanosine-3'-phosphate
  modified_base 13: mod_base = OTHER; note = uridine-3'-phosphate
  modified_base 14: mod_base = OTHER; note = cytidine-3'-phosphate
  modified_base 15: mod_base = OTHER; note = uridine-3'-phosphate
  modified_base 16: mod_base = OTHER; note = cytidine-3'-phosphate
  modified_base 17: mod_base = OTHER; note = uridine-3'-phosphate
  modified_base 18: mod_base = OTHER; note = guanosine-3'-phosphate
  modified_base 19: mod_base = OTHER; note = cytidine-3'-phosphate
  misc_feature 1..19: note = RNA
  misc_feature 20..21: note = DNA
tttgttttcttgtctctgctt

SEQ ID NO: 2796 - DNA, 21 bp, synthetic construct
  source 1..21: mol_type = other DNA
  modified_base 1: mod_base = OTHER; note = cytidine-3'-phosphate
  modified_base 2: mod_base = OTHER; note = adenosine-3'-phosphate
  modified_base 3: mod_base = OTHER; note = uridine-3'-phosphate
  modified_base 4: mod_base = OTHER; note = guanosine-3'-phosphate
  modified_base 5: mod_base = OTHER; note = cytidine-3'-phosphate
  modified_base 6: mod_base = OTHER; note = uridine-3'-phosphate
  modified_base 7: mod_base = OTHER; note = guanosine-3'-phosphate
  modified_base 8: mod_base = OTHER; note = uridine-3'-phosphate
  modified_base 9: mod_base = OTHER; note = uridine-3'-phosphate
  modified_base 10: mod_base = OTHER; note = uridine-3'-phosphate
  modified_base 11: mod_base = OTHER; note = guanosine-3'-phosphate
  modified_base 12: mod_base = OTHER; note = uridine-3'-phosphate
  modified_base 13: mod_base = OTHER; note = uridine-3'-phosphate
  modified_base 14: mod_base = OTHER; note = uridine-3'-phosphate
  modified_base 15: mod_base = OTHER; note = uridine-3'-phosphate
  modified_base 16: mod_base = OTHER; note = cytidine-3'-phosphate
  modified_base 17: mod_base = OTHER; note = uridine-3'-phosphate
  modified_base 18: mod_base = OTHER; note = uridine-3'-phosphate
  modified_base 19: mod_base = OTHER; note = guanosine-3'-phosphate
  misc_feature 1..19: note = RNA
  misc_feature 20..21: note = DNA
catgctgtttgttttcttgtt

SEQ ID NO: 2797 - DNA, 21 bp, synthetic construct
  source 1..21: mol_type = other DNA
  modified_base 1: mod_base = OTHER; note = uridine-3'-phosphate
  modified_base 2: mod_base = OTHER; note = cytidine-3'-phosphate
  modified_base 3: mod_base = OTHER; note = uridine-3'-phosphate
  modified_base 4: mod_base = OTHER; note = cytidine-3'-phosphate
  modified_base 5: mod_base = OTHER; note = uridine-3'-phosphate
  modified_base 6: mod_base = OTHER; note = guanosine-3'-phosphate
  modified_base 7: mod_base = OTHER; note = guanosine-3'-phosphate
  modified_base 8: mod_base = OTHER; note = uridine-3'-phosphate
  modified_base 9: mod_base = OTHER; note = uridine-3'-phosphate
  modified_base 10: mod_base = OTHER; note = uridine-3'-phosphate
  modified_base 11: mod_base = OTHER; note = adenosine-3'-phosphate
  modified_base 12: mod_base = OTHER; note = cytidine-3'-phosphate
  modified_base 13: mod_base = OTHER; note = adenosine-3'-phosphate
  modified_base 14: mod_base = OTHER; note = uridine-3'-phosphate
  modified_base 15: mod_base = OTHER; note = guanosine-3'-phosphate
  modified_base 16: mod_base = OTHER; note = cytidine-3'-phosphate
  modified_base 17: mod_base = OTHER; note = uridine-3'-phosphate
  modified_base 18: mod_base = OTHER; note = guanosine-3'-phosphate
  modified_base 19: mod_base = OTHER; note = uridine-3'-phosphate
  misc_feature 1..19: note = RNA
  misc_feature 20..21: note = DNA
tctctggtttacatgctgttt

SEQ ID NO: 2798 - DNA, 21 bp, synthetic construct
  source 1..21: mol_type = other DNA
  modified_base 1: mod_base = OTHER; note = adenosine-3'-phosphate
  modified_base 2: mod_base = OTHER; note = adenosine-3'-phosphate
  modified_base 3: mod_base = OTHER; note = guanosine-3'-phosphate
  modified_base 4: mod_base = OTHER; note = cytidine-3'-phosphate
  modified_base 5: mod_base = OTHER; note = adenosine-3'-phosphate
  modified_base 6: mod_base = OTHER; note = uridine-3'-phosphate
  modified_base 7: mod_base = OTHER; note = adenosine-3'-phosphate
  modified_base 8: mod_base = OTHER; note = uridine-3'-phosphate
  modified_base 9: mod_base = OTHER; note = guanosine-3'-phosphate
  modified_base 10: mod_base = OTHER; note = cytidine-3'-phosphate
  modified_base 11: mod_base = OTHER; note = adenosine-3'-phosphate
  modified_base 12: mod_base = OTHER; note = adenosine-3'-phosphate
  modified_base 13: mod_base = OTHER; note = uridine-3'-phosphate
  modified_base 14: mod_base = OTHER; note = cytidine-3'-phosphate
  modified_base 15: mod_base = OTHER; note = uridine-3'-phosphate
  modified_base 16: mod_base = OTHER; note = cytidine-3'-phosphate
  modified_base 17: mod_base = OTHER; note = uridine-3'-phosphate
  modified_base 18: mod_base = OTHER; note = guanosine-3'-phosphate
  modified_base 19: mod_base = OTHER; note = guanosine-3'-phosphate
  misc_feature 1..19: note = RNA
  misc_feature 20..21: note = DNA
aagcatatgcaatctctggtt

SEQ ID NO: 2799 - DNA, 21 bp, synthetic construct
  source 1..21: mol_type = other DNA
  modified_base 1: mod_base = OTHER; note = uridine-3'-phosphate
  modified_base 2: mod_base = OTHER; note = adenosine-3'-phosphate
  modified_base 3: mod_base = OTHER; note = adenosine-3'-phosphate
  modified_base 4: mod_base = OTHER; note = cytidine-3'-phosphate
  modified_base 5: mod_base = OTHER; note = uridine-3'-phosphate
  modified_base 6: mod_base = OTHER; note = uridine-3'-phosphate
  modified_base 7: mod_base = OTHER; note = uridine-3'-phosphate
  modified_base 8: mod_base = OTHER; note = adenosine-3'-phosphate
  modified_base 9: mod_base = OTHER; note = uridine-3'-phosphate
  modified_base 10: mod_base = OTHER; note = adenosine-3'-phosphate
  modified_base 11: mod_base = OTHER; note = adenosine-3'-phosphate
  modified_base 12: mod_base = OTHER; note = guanosine-3'-phosphate
  modified_base 13: mod_base = OTHER; note = cytidine-3'-phosphate
  modified_base 14: mod_base = OTHER; note = adenosine-3'-phosphate
  modified_base 15: mod_base = OTHER; note = uridine-3'-phosphate
  modified_base 16: mod_base = OTHER; note = adenosine-3'-phosphate
  modified_base 17: mod_base = OTHER; note = uridine-3'-phosphate
  modified_base 18: mod_base = OTHER; note = guanosine-3'-phosphate
  modified_base 19: mod_base = OTHER; note = cytidine-3'-phosphate
  misc_feature 1..19: note = RNA
  misc_feature 20..21: note = DNA
taactttataagcatatgctt

SEQ ID NO: 2800 - DNA, 21 bp, synthetic construct
  source 1..21: mol_type = other DNA
  modified_base 1: mod_base = OTHER; note = uridine-3'-phosphate
  modified_base 2: mod_base = OTHER; note = guanosine-3'-phosphate
  modified_base 3: mod_base = OTHER; note = uridine-3'-phosphate
  modified_base 4: mod_base = OTHER; note = guanosine-3'-phosphate
  modified_base 5: mod_base = OTHER; note = adenosine-3'-phosphate
  modified_base 6: mod_base = OTHER; note = uridine-3'-phosphate
  modified_base 7: mod_base = OTHER; note = guanosine-3'-phosphate
  modified_base 8: mod_base = OTHER; note = cytidine-3'-phosphate
  modified_base 9: mod_base = OTHER; note = uridine-3'-phosphate
  modified_base 10: mod_base = OTHER; note = adenosine-3'-phosphate
  modified_base 11: mod_base = OTHER; note = adenosine-3'-phosphate
  modified_base 12: mod_base = OTHER; note = cytidine-3'-phosphate
  modified_base 13: mod_base = OTHER; note = uridine-3'-phosphate
  modified_base 14: mod_base = OTHER; note = uridine-3'-phosphate
  modified_base 15: mod_base = OTHER; note = uridine-3'-phosphate
  modified_base 16: mod_base = OTHER; note = adenosine-3'-phosphate
  modified_base 17: mod_base = OTHER; note = uridine-3'-phosphate
  modified_base 18: mod_base = OTHER; note = adenosine-3'-phosphate
  modified_base 19: mod_base = OTHER; note = adenosine-3'-phosphate
  misc_feature 1..19: note = RNA
  misc_feature 20..21: note = DNA
tgtgatgctaactttataatt

SEQ ID NO: 2801 - DNA, 21 bp, synthetic construct
  source 1..21: mol_type = other DNA
  modified_base 1: mod_base = OTHER; note = uridine-3'-phosphate
  modified_base 2: mod_base = OTHER; note = adenosine-3'-phosphate
  modified_base 3: mod_base = OTHER; note = cytidine-3'-phosphate
  modified_base 4: mod_base = OTHER; note = adenosine-3'-phosphate
  modified_base 5: mod_base = OTHER; note = guanosine-3'-phosphate
  modified_base 6: mod_base = OTHER; note = uridine-3'-phosphate
  modified_base 7: mod_base = OTHER; note = guanosine-3'-phosphate
  modified_base 8: mod_base = OTHER; note = adenosine-3'-phosphate
  modified_base 9: mod_base = OTHER; note = uridine-3'-phosphate
  modified_base 10: mod_base = OTHER; note = guanosine-3'-phosphate
  modified_base 11: mod_base = OTHER; note = guanosine-3'-phosphate
  modified_base 12: mod_base = OTHER; note = adenosine-3'-phosphate
  modified_base 13: mod_base = OTHER; note = uridine-3'-phosphate
  modified_base 14: mod_base = OTHER; note = guanosine-3'-phosphate
  modified_base 15: mod_base = OTHER; note = uridine-3'-phosphate
  modified_base 16: mod_base = OTHER; note = guanosine-3'-phosphate
  modified_base 17: mod_base = OTHER; note = adenosine-3'-phosphate
  modified_base 18: mod_base = OTHER; note = uridine-3'-phosphate
  modified_base 19: mod_base = OTHER; note = guanosine-3'-phosphate
  misc_feature 1..19: note = RNA
  misc_feature 20..21: note = DNA
tacagtgatggatgtgatgtt

SEQ ID NO: 2802 - DNA, 21 bp, synthetic construct
  source 1..21: mol_type = other DNA
  modified_base 1: mod_base = OTHER; note = adenosine-3'-phosphate
  modified_base 2: mod_base = OTHER; note = adenosine-3'-phosphate
  modified_base 3: mod_base = OTHER; note = adenosine-3'-phosphate
  modified_base 4: mod_base = OTHER; note = adenosine-3'-phosphate
  modified_base 5: mod_base = OTHER; note = cytidine-3'-phosphate
  modified_base 6: mod_base = OTHER; note = adenosine-3'-phosphate
  modified_base 7: mod_base = OTHER; note = uridine-3'-phosphate
  modified_base 8: mod_base = OTHER; note = uridine-3'-phosphate
  modified_base 9: mod_base = OTHER; note = uridine-3'-phosphate
  modified_base 10: mod_base = OTHER; note = uridine-3'-phosphate
  modified_base 11: mod_base = OTHER; note = cytidine-3'-phosphate
  modified_base 12: mod_base = OTHER; note = uridine-3'-phosphate
  modified_base 13: mod_base = OTHER; note = adenosine-3'-phosphate
  modified_base 14: mod_base = OTHER; note = cytidine-3'-phosphate
  modified_base 15: mod_base = OTHER; note = adenosine-3'-phosphate
  modified_base 16: mod_base = OTHER; note = guanosine-3'-phosphate
  modified_base 17: mod_base = OTHER; note = uridine-3'-phosphate
  modified_base 18: mod_base = OTHER; note = guanosine-3'-phosphate
  modified_base 19: mod_base = OTHER; note = adenosine-3'-phosphate
  misc_feature 1..19: note = RNA
  misc_feature 20..21: note = DNA
aaaacattttctacagtgatt

SEQ ID NO: 2803 - DNA, 21 bp, synthetic construct
  source 1..21: mol_type = other DNA
  modified_base 1: mod_base = OTHER; note = cytidine-3'-phosphate
  modified_base 2: mod_base = OTHER; note = uridine-3'-phosphate
  modified_base 3: mod_base = OTHER; note = uridine-3'-phosphate
  modified_base 4: mod_base = OTHER; note = guanosine-3'-phosphate
  modified_base 5: mod_base = OTHER; note = adenosine-3'-phosphate
  modified_base 6: mod_base = OTHER; note = cytidine-3'-phosphate
  modified_base 7: mod_base = OTHER; note = adenosine-3'-phosphate
  modified_base 8: mod_base = OTHER; note = adenosine-3'-phosphate
  modified_base 9: mod_base = OTHER; note = adenosine-3'-phosphate
  modified_base 10: mod_base = OTHER; note = adenosine-3'-phosphate
  modified_base 11: mod_base = OTHER; note = adenosine-3'-phosphate
  modified_base 12: mod_base = OTHER; note = cytidine-3'-phosphate
  modified_base 13: mod_base = OTHER; note = adenosine-3'-phosphate
  modified_base 14: mod_base = OTHER; note = uridine-3'-phosphate
  modified_base 15: mod_base = OTHER; note = uridine-3'-phosphate
  modified_base 16: mod_base = OTHER; note = uridine-3'-phosphate
  modified_base 17: mod_base = OTHER; note = uridine-3'-phosphate
  modified_base 18: mod_base = OTHER; note = cytidine-3'-phosphate
  modified_base 19: mod_base = OTHER; note = uridine-3'-phosphate
  misc_feature 1..19: note = RNA
  misc_feature 20..21: note = DNA
cttgacaaaaacattttcttt

SEQ ID NO: 2804 - DNA, 21 bp, synthetic construct
  source 1..21: mol_type = other DNA
  modified_base 1: mod_base = OTHER; note = uridine-3'-phosphate
  modified_base 2: mod_base = OTHER; note = uridine-3'-phosphate
  modified_base 3: mod_base = OTHER; note = guanosine-3'-phosphate
  modified_base 4: mod_base = OTHER; note = cytidine-3'-phosphate
  modified_base 5: mod_base = OTHER; note = cytidine-3'-phosphate
  modified_base 6: mod_base = OTHER; note = uridine-3'-phosphate
  modified_base 7: mod_base = OTHER; note = uridine-3'-phosphate
  modified_base 8: mod_base = OTHER; note = guanosine-3'-phosphate
  modified_base 9: mod_base = OTHER; note = uridine-3'-phosphate
  modified_base 10: mod_base = OTHER; note = adenosine-3'-phosphate
  modified_base 11: mod_base = OTHER; note = cytidine-3'-phosphate
  modified_base 12: mod_base = OTHER; note = uridine-3'-phosphate
  modified_base 13: mod_base = OTHER; note = uridine-3'-phosphate
  modified_base 14: mod_base = OTHER; note = guanosine-3'-phosphate
  modified_base 15: mod_base = OTHER; note = adenosine-3'-phosphate
  modified_base 16: mod_base = OTHER; note = cytidine-3'-phosphate
  modified_base 17: mod_base = OTHER; note = adenosine-3'-phosphate
  modified_base 18: mod_base = OTHER; note = adenosine-3'-phosphate
  modified_base 19: mod_base = OTHER; note = adenosine-3'-phosphate
  misc_feature 1..19: note = RNA
  misc_feature 20..21: note = DNA
ttgccttgtacttgacaaatt

SEQ ID NO: 2805 - DNA, 21 bp, synthetic construct
  source 1..21: mol_type = other DNA
  modified_base 1: mod_base = OTHER; note = adenosine-3'-phosphate
  modified_base 2: mod_base = OTHER; note = uridine-3'-phosphate
  modified_base 3: mod_base = OTHER; note = adenosine-3'-phosphate
  modified_base 4: mod_base = OTHER; note = uridine-3'-phosphate
  modified_base 5: mod_base = OTHER; note = cytidine-3'-phosphate
  modified_base 6: mod_base = OTHER; note = cytidine-3'-phosphate
  modified_base 7: mod_base = OTHER; note = adenosine-3'-phosphate
  modified_base 8: mod_base = OTHER; note = guanosine-3'-phosphate
  modified_base 9: mod_base = OTHER; note = adenosine-3'-phosphate
  modified_base 10: mod_base = OTHER; note = adenosine-3'-phosphate
  modified_base 11: mod_base = OTHER; note = guanosine-3'-phosphate
  modified_base 12: mod_base = OTHER; note = guanosine-3'-phosphate
  modified_base 13: mod_base = OTHER; note = guanosine-3'-phosphate
  modified_base 14: mod_base = OTHER; note = uridine-3'-phosphate
  modified_base 15: mod_base = OTHER; note = uridine-3'-phosphate
  modified_base 16: mod_base = OTHER; note = guanosine-3'-phosphate
  modified_base 17: mod_base = OTHER; note = cytidine-3'-phosphate
  modified_base 18: mod_base = OTHER; note = cytidine-3'-phosphate
  modified_base 19: mod_base = OTHER; note = uridine-3'-phosphate
  misc_feature 1..19: note = RNA
  misc_feature 20..21: note = DNA
atatccagaagggttgccttt

SEQ ID NO: 2806 - DNA, 21 bp, synthetic construct
  source 1..21: mol_type = other DNA
  modified_base 1: mod_base = OTHER; note = uridine-3'-phosphate
  modified_base 2: mod_base = OTHER; note = uridine-3'-phosphate
  modified_base 3: mod_base = OTHER; note = uridine-3'-phosphate
  modified_base 4: mod_base = OTHER; note = guanosine-3'-phosphate
  modified_base 5: mod_base = OTHER; note = uridine-3'-phosphate
  modified_base 6: mod_base = OTHER; note = adenosine-3'-phosphate
  modified_base 7: mod_base = OTHER; note = guanosine-3'-phosphate
  modified_base 8: mod_base = OTHER; note = adenosine-3'-phosphate
  modified_base 9: mod_base = OTHER; note = uridine-3'-phosphate
  modified_base 10: mod_base = OTHER; note = adenosine-3'-phosphate
  modified_base 11: mod_base = OTHER; note = uridine-3'-phosphate
  modified_base 12: mod_base = OTHER; note = cytidine-3'-phosphate
  modified_base 13: mod_base = OTHER; note = cytidine-3'-phosphate
  modified_base 14: mod_base = OTHER; note = adenosine-3'-phosphate
  modified_base 15: mod_base = OTHER; note = guanosine-3'-phosphate
  modified_base 16: mod_base = OTHER; note = adenosine-3'-phosphate
  modified_base 17: mod_base = OTHER; note = adenosine-3'-phosphate
  modified_base 18: mod_base = OTHER; note = guanosine-3'-phosphate
  modified_base 19: mod_base = OTHER; note = guanosine-3'-phosphate
  misc_feature 1..19: note = RNA
  misc_feature 20..21: note = DNA
tttgtagatatccagaaggtt

SEQ ID NO: 2807 - DNA, 21 bp, synthetic construct
  source 1..21: mol_type = other DNA
  modified_base 1: mod_base = OTHER; note = uridine-3'-phosphate
  modified_base 2: mod_base = OTHER; note = uridine-3'-phosphate
  modified_base 3: mod_base = OTHER; note = cytidine-3'-phosphate
  modified_base 4: mod_base = OTHER; note = cytidine-3'-phosphate
  modified_base 5: mod_base = OTHER; note = cytidine-3'-phosphate
  modified_base 6: mod_base = OTHER; note = cytidine-3'-phosphate
  modified_base 7: mod_base = OTHER; note = adenosine-3'-phosphate
  modified_base 8: mod_base = OTHER; note = guanosine-3'-phosphate
  modified_base 9: mod_base = OTHER; note = uridine-3'-phosphate
  modified_base 10: mod_base = OTHER; note = uridine-3'-phosphate
  modified_base 11: mod_base = OTHER; note = uridine-3'-phosphate
  modified_base 12: mod_base = OTHER; note = uridine-3'-phosphate
  modified_base 13: mod_base = OTHER; note = guanosine-3'-phosphate
  modified_base 14: mod_base = OTHER; note = uridine-3'-phosphate
  modified_base 15: mod_base = OTHER; note = adenosine-3'-phosphate
  modified_base 16: mod_base = OTHER; note = guanosine-3'-phosphate
  modified_base 17: mod_base = OTHER; note = adenosine-3'-phosphate
  modified_base 18: mod_base = OTHER; note = uridine-3'-phosphate
  modified_base 19: mod_base = OTHER; note = adenosine-3'-phosphate
  misc_feature 1..19: note = RNA
  misc_feature 20..21: note = DNA
ttccccagttttgtagatatt

SEQ ID NO: 2808 - DNA, 21 bp, synthetic construct
  source 1..21: mol_type = other DNA
  modified_base 1: mod_base = OTHER; note = uridine-3'-phosphate
  modified_base 2: mod_base = OTHER; note = cytidine-3'-phosphate
  modified_base 3: mod_base = OTHER; note = adenosine-3'-phosphate
  modified_base 4: mod_base = OTHER; note = guanosine-3'-phosphate
  modified_base 5: mod_base = OTHER; note = cytidine-3'-phosphate
  modified_base 6: mod_base = OTHER; note = adenosine-3'-phosphate
  modified_base 7: mod_base = OTHER; note = adenosine-3'-phosphate
  modified_base 8: mod_base = OTHER; note = cytidine-3'-phosphate
  modified_base 9: mod_base = OTHER; note = adenosine-3'-phosphate
  modified_base 10: mod_base = OTHER; note = guanosine-3'-phosphate
  modified_base 11: mod_base = OTHER; note = cytidine-3'-phosphate
  modified_base 12: mod_base = OTHER; note = uridine-3'-phosphate
  modified_base 13: mod_base = OTHER; note = uridine-3'-phosphate
  modified_base 14: mod_base = OTHER; note = cytidine-3'-phosphate
  modified_base 15: mod_base = OTHER; note = cytidine-3'-phosphate
  modified_base 16: mod_base = OTHER; note = cytidine-3'-phosphate
  modified_base 17: mod_base = OTHER; note = cytidine-3'-phosphate
  modified_base 18: mod_base = OTHER; note = adenosine-3'-phosphate
  modified_base 19: mod_base = OTHER; note = guanosine-3'-phosphate
  misc_feature 1..19: note = RNA
  misc_feature 20..21: note = DNA
tcagcaacagcttccccagtt

SEQ ID NO: 2809 - DNA, 21 bp, synthetic construct
  source 1..21: mol_type = other DNA
  modified_base 1: mod_base = OTHER; note = guanosine-3'-phosphate
  modified_base 2: mod_base = OTHER; note = adenosine-3'-phosphate
  modified_base 3: mod_base = OTHER; note = guanosine-3'-phosphate
  modified_base 4: mod_base = OTHER; note = uridine-3'-phosphate
  modified_base 5: mod_base = OTHER; note = cytidine-3'-phosphate
  modified_base 6: mod_base = OTHER; note = uridine-3'-phosphate
  modified_base 7: mod_base = OTHER; note = uridine-3'-phosphate
  modified_base 8: mod_base = OTHER; note = uridine-3'-phosphate
  modified_base 9: mod_base = OTHER; note = cytidine-3'-phosphate
  modified_base 10: mod_base = OTHER; note = uridine-3'-phosphate
  modified_base 11: mod_base = OTHER; note = cytidine-3'-phosphate
  modified_base 12: mod_base = OTHER; note = adenosine-3'-phosphate
  modified_base 13: mod_base = OTHER; note = guanosine-3'-phosphate
  modified_base 14: mod_base = OTHER; note = cytidine-3'-phosphate
  modified_base 15: mod_base = OTHER; note = adenosine-3'-phosphate
  modified_base 16: mod_base = OTHER; note = adenosine-3'-phosphate
  modified_base 17: mod_base = OTHER; note = cytidine-3'-phosphate
  modified_base 18: mod_base = OTHER; note = adenosine-3'-phosphate
  modified_base 19: mod_base = OTHER; note = guanosine-3'-phosphate
  misc_feature 1..19: note = RNA
  misc_feature 20..21: note = DNA
gagtctttctcagcaacagtt

SEQ ID NO: 2810 - DNA, 21 bp, synthetic construct
  source 1..21: mol_type = other DNA
  modified_base 1: mod_base = OTHER; note = uridine-3'-phosphate
  modified_base 2: mod_base = OTHER; note = guanosine-3'-phosphate
  modified_base 3: mod_base = OTHER; note = adenosine-3'-phosphate
  modified_base 4: mod_base = OTHER; note = adenosine-3'-phosphate
  modified_base 5: mod_base = OTHER; note = guanosine-3'-phosphate
  modified_base 6: mod_base = OTHER; note = guanosine-3'-phosphate
  modified_base 7: mod_base = OTHER; note = uridine-3'-phosphate
  modified_base 8: mod_base = OTHER; note = adenosine-3'-phosphate
  modified_base 9: mod_base = OTHER; note = adenosine-3'-phosphate
  modified_base 10: mod_base = OTHER; note = uridine-3'-phosphate
  modified_base 11: mod_base = OTHER; note = cytidine-3'-phosphate
  modified_base 12: mod_base = OTHER; note = uridine-3'-phosphate
  modified_base 13: mod_base = OTHER; note = cytidine-3'-phosphate
  modified_base 14: mod_base = OTHER; note = adenosine-3'-phosphate
  modified_base 15: mod_base = OTHER; note = guanosine-3'-phosphate
  modified_base 16: mod_base = OTHER; note = adenosine-3'-phosphate
  modified_base 17: mod_base = OTHER; note = guanosine-3'-phosphate
  modified_base 18: mod_base = OTHER; note = uridine-3'-phosphate
  modified_base 19: mod_base = OTHER; note = cytidine-3'-phosphate
  misc_feature 1..19: note = RNA
  misc_feature 20..21: note = DNA
tgaaggtaatctcagagtctt

SEQ ID NO: 2811 - DNA, 21 bp, synthetic construct
  source 1..21: mol_type = other DNA
  modified_base 1: mod_base = OTHER; note = uridine-3'-phosphate
  modified_base 2: mod_base = OTHER; note = uridine-3'-phosphate
  modified_base 3: mod_base = OTHER; note = uridine-3'-phosphate
  modified_base 4: mod_base = OTHER; note = uridine-3'-phosphate
  modified_base 5: mod_base = OTHER; note = adenosine-3'-phosphate
  modified_base 6: mod_base = OTHER; note = adenosine-3'-phosphate
  modified_base 7: mod_base = OTHER; note = uridine-3'-phosphate
  modified_base 8: mod_base = OTHER; note = guanosine-3'-phosphate
  modified_base 9: mod_base = OTHER; note = adenosine-3'-phosphate
  modified_base 10: mod_base = OTHER; note = adenosine-3'-phosphate
  modified_base 11: mod_base = OTHER; note = guanosine-3'-phosphate
  modified_base 12: mod_base = OTHER; note = guanosine-3'-phosphate
  modified_base 13: mod_base = OTHER; note = uridine-3'-phosphate
  modified_base 14: mod_base = OTHER; note = adenosine-3'-phosphate
  modified_base 15: mod_base = OTHER; note = adenosine-3'-phosphate
  modified_base 16: mod_base = OTHER; note = uridine-3'-phosphate
  modified_base 17: mod_base = OTHER; note = cytidine-3'-phosphate
  modified_base 18: mod_base = OTHER; note = uridine-3'-phosphate
  modified_base 19: mod_base = OTHER; note = cytidine-3'-phosphate
  misc_feature 1..19: note = RNA
  misc_feature 20..21: note = DNA
ttttaatgaaggtaatctctt

SEQ ID NO: 2812 - DNA, 21 bp, synthetic construct
  source 1..21: mol_type = other DNA
  modified_base 1: mod_base = OTHER; note = uridine-3'-phosphate
  modified_base 2: mod_base = OTHER; note = adenosine-3'-phosphate
  modified_base 3: mod_base = OTHER; note = cytidine-3'-phosphate
  modified_base 4: mod_base = OTHER; note = adenosine-3'-phosphate
  modified_base 5: mod_base = OTHER; note = guanosine-3'-phosphate
  modified_base 6: mod_base = OTHER; note = guanosine-3'-phosphate
  modified_base 7: mod_base = OTHER; note = uridine-3'-phosphate
  modified_base 8: mod_base = OTHER; note = uridine-3'-phosphate
  modified_base 9: mod_base = OTHER; note = adenosine-3'-phosphate
  modified_base 10: mod_base = OTHER; note = cytidine-3'-phosphate
  modified_base 11: mod_base = OTHER; note = cytidine-3'-phosphate
  modified_base 12: mod_base = OTHER; note = uridine-3'-phosphate
  modified_base 13: mod_base = OTHER; note = uridine-3'-phosphate
  modified_base 14: mod_base = OTHER; note = uridine-3'-phosphate
  modified_base 15: mod_base = OTHER; note = uridine-3'-phosphate
  modified_base 16: mod_base = OTHER; note = uridine-3'-phosphate
  modified_base 17: mod_base = OTHER; note = adenosine-3'-phosphate
  modified_base 18: mod_base = OTHER; note = adenosine-3'-phosphate
  modified_base 19: mod_base = OTHER; note = uridine-3'-phosphate
  misc_feature 1..19: note = RNA
  misc_feature 20..21: note = DNA
tacaggttacctttttaattt

SEQ ID NO: 2813 - DNA, 21 bp, synthetic construct
  source 1..21: mol_type = other DNA
  modified_base 1: mod_base = OTHER; note = uridine-3'-phosphate
  modified_base 2: mod_base = OTHER; note = cytidine-3'-phosphate
  modified_base 3: mod_base = OTHER; note = adenosine-3'-phosphate
  modified_base 4: mod_base = OTHER; note = guanosine-3'-phosphate
  modified_base 5: mod_base = OTHER; note = cytidine-3'-phosphate
  modified_base 6: mod_base = OTHER; note = guanosine-3'-phosphate
  modified_base 7: mod_base = OTHER; note = uridine-3'-phosphate
  modified_base 8: mod_base = OTHER; note = uridine-3'-phosphate
  modified_base 9: mod_base = OTHER; note = adenosine-3'-phosphate
  modified_base 10: mod_base = OTHER; note = guanosine-3'-phosphate
  modified_base 11: mod_base = OTHER; note = uridine-3'-phosphate
  modified_base 12: mod_base = OTHER; note = adenosine-3'-phosphate
  modified_base 13: mod_base = OTHER; note = cytidine-3'-phosphate
  modified_base 14: mod_base = OTHER; note = adenosine-3'-phosphate
  modified_base 15: mod_base = OTHER; note = guanosine-3'-phosphate
  modified_base 16: mod_base = OTHER; note = guanosine-3'-phosphate
  modified_base 17: mod_base = OTHER; note = uridine-3'-phosphate
  modified_base 18: mod_base = OTHER; note = uridine-3'-phosphate
  modified_base 19: mod_base = OTHER; note = adenosine-3'-phosphate
  misc_feature 1..19: note = RNA
  misc_feature 20..21: note = DNA
tcagcgttagtacaggttatt

SEQ ID NO: 2814 - DNA, 21 bp, synthetic construct
  source 1..21: mol_type = other DNA
  modified_base 1: mod_base = OTHER; note = uridine-3'-phosphate
  modified_base 2: mod_base = OTHER; note = uridine-3'-phosphate
  modified_base 3: mod_base = OTHER; note = uridine-3'-phosphate
  modified_base 4: mod_base = OTHER; note = adenosine-3'-phosphate
  modified_base 5: mod_base = OTHER; note = cytidine-3'-phosphate
  modified_base 6: mod_base = OTHER; note = cytidine-3'-phosphate
  modified_base 7: mod_base = OTHER; note = adenosine-3'-phosphate
  modified_base 8: mod_base = OTHER; note = guanosine-3'-phosphate
  modified_base 9: mod_base = OTHER; note = cytidine-3'-phosphate
  modified_base 10: mod_base = OTHER; note = uridine-3'-phosphate
  modified_base 11: mod_base = OTHER; note = cytidine-3'-phosphate
  modified_base 12: mod_base = OTHER; note = adenosine-3'-phosphate
  modified_base 13: mod_base = OTHER; note = guanosine-3'-phosphate
  modified_base 14: mod_base = OTHER; note = cytidine-3'-phosphate
  modified_base 15: mod_base = OTHER; note = guanosine-3'-phosphate
  modified_base 16: mod_base = OTHER; note = uridine-3'-phosphate
  modified_base 17: mod_base = OTHER; note = uridine-3'-phosphate
  modified_base 18: mod_base = OTHER; note = adenosine-3'-phosphate
  modified_base 19: mod_base = OTHER; note = guanosine-3'-phosphate
  misc_feature 1..19: note = RNA
  misc_feature 20..21: note = DNA
tttaccagctcagcgttagtt

SEQ ID NO: 2815 - DNA, 21 bp, synthetic construct
  source 1..21: mol_type = other DNA
  modified_base 1: mod_base = OTHER; note = guanosine-3'-phosphate
  modified_base 2: mod_base = OTHER; note = uridine-3'-phosphate
  modified_base 3: mod_base = OTHER; note = adenosine-3'-phosphate
  modified_base 4: mod_base = OTHER; note = cytidine-3'-phosphate
  modified_base 5: mod_base = OTHER; note = uridine-3'-phosphate
  modified_base 6: mod_base = OTHER; note = guanosine-3'-phosphate
  modified_base 7: mod_base = OTHER; note = uridine-3'-phosphate
  modified_base 8: mod_base = OTHER; note = cytidine-3'-phosphate
  modified_base 9: mod_base = OTHER; note = uridine-3'-phosphate
  modified_base 10: mod_base = OTHER; note = uridine-3'-phosphate
  modified_base 11: mod_base = OTHER; note = cytidine-3'-phosphate
  modified_base 12: mod_base = OTHER; note = cytidine-3'-phosphate
  modified_base 13: mod_base = OTHER; note = uridine-3'-phosphate
  modified_base 14: mod_base = OTHER; note = uridine-3'-phosphate
  modified_base 15: mod_base = OTHER; note = uridine-3'-phosphate
  modified_base 16: mod_base = OTHER; note = uridine-3'-phosphate
  modified_base 17: mod_base = OTHER; note = adenosine-3'-phosphate
  modified_base 18: mod_base = OTHER; note = cytidine-3'-phosphate
  modified_base 19: mod_base = OTHER; note = cytidine-3'-phosphate
  misc_feature 1..19: note = RNA
  misc_feature 20..21: note = DNA
gtactgtcttccttttacctt

SEQ ID NO: 2816 - DNA, 21 bp, synthetic construct
  source 1..21: mol_type = other DNA
  modified_base 1: mod_base = OTHER; note = adenosine-3'-phosphate
  modified_base 2: mod_base = OTHER; note = uridine-3'-phosphate
  modified_base 3: mod_base = OTHER; note = adenosine-3'-phosphate
  modified_base 4: mod_base = OTHER; note = adenosine-3'-phosphate
  modified_base 5: mod_base = OTHER; note = uridine-3'-phosphate
  modified_base 6: mod_base = OTHER; note = uridine-3'-phosphate
  modified_base 7: mod_base = OTHER; note = adenosine-3'-phosphate
  modified_base 8: mod_base = OTHER; note = adenosine-3'-phosphate
  modified_base 9: mod_base = OTHER; note = guanosine-3'-phosphate
  modified_base 10: mod_base = OTHER; note = uridine-3'-phosphate
  modified_base 11: mod_base = OTHER; note = adenosine-3'-phosphate
  modified_base 12: mod_base = OTHER; note = cytidine-3'-phosphate
  modified_base 13: mod_base = OTHER; note = uridine-3'-phosphate
  modified_base 14: mod_base = OTHER; note = guanosine-3'-phosphate
  modified_base 15: mod_base = OTHER; note = uridine-3'-phosphate
  modified_base 16: mod_base = OTHER; note = cytidine-3'-phosphate
  modified_base 17: mod_base = OTHER; note = uridine-3'-phosphate
  modified_base 18: mod_base = OTHER; note = uridine-3'-phosphate
  modified_base 19: mod_base = OTHER; note = cytidine-3'-phosphate
  misc_feature 1..19: note = RNA
  misc_feature 20..21: note = DNA
ataattaagtactgtcttctt

SEQ ID NO: 2817 - DNA, 21 bp, synthetic construct
  source 1..21: mol_type = other DNA
  modified_base 1: mod_base = OTHER; note = uridine-3'-phosphate
  modified_base 2: mod_base = OTHER; note = uridine-3'-phosphate
  modified_base 3: mod_base = OTHER; note = cytidine-3'-phosphate
  modified_base 4: mod_base = OTHER; note = uridine-3'-phosphate
  modified_base 5: mod_base = OTHER; note = uridine-3'-phosphate
  modified_base 6: mod_base = OTHER; note = uridine-3'-phosphate
  modified_base 7: mod_base = OTHER; note = adenosine-3'-phosphate
  modified_base 8: mod_base = OTHER; note = cytidine-3'-phosphate
  modified_base 9: mod_base = OTHER; note = cytidine-3'-phosphate
  modified_base 10: mod_base = OTHER; note = cytidine-3'-phosphate
  modified_base 11: mod_base = OTHER; note = adenosine-3'-phosphate
  modified_base 12: mod_base = OTHER; note = uridine-3'-phosphate
  modified_base 13: mod_base = OTHER; note = adenosine-3'-phosphate
  modified_base 14: mod_base = OTHER; note = adenosine-3'-phosphate
  modified_base 15: mod_base = OTHER; note = uridine-3'-phosphate
  modified_base 16: mod_base = OTHER; note = uridine-3'-phosphate
  modified_base 17: mod_base = OTHER; note = adenosine-3'-phosphate
  modified_base 18: mod_base = OTHER; note = adenosine-3'-phosphate
  modified_base 19: mod_base = OTHER; note = guanosine-3'-phosphate
  misc_feature 1..19: note = RNA
  misc_feature 20..21: note = DNA
ttctttacccataattaagtt

SEQ ID NO: 2818 - DNA, 21 bp, synthetic construct
  source 1..21: mol_type = other DNA
  modified_base 1: mod_base = OTHER; note = uridine-3'-phosphate
  modified_base 2: mod_base = OTHER; note = adenosine-3'-phosphate
  modified_base 3: mod_base = OTHER; note = uridine-3'-phosphate
  modified_base 4: mod_base = OTHER; note = cytidine-3'-phosphate
  modified_base 5: mod_base = OTHER; note = uridine-3'-phosphate
  modified_base 6: mod_base = OTHER; note = guanosine-3'-phosphate
  modified_base 7: mod_base = OTHER; note = guanosine-3'-phosphate
  modified_base 8: mod_base = OTHER; note = adenosine-3'-phosphate
  modified_base 9: mod_base = OTHER; note = guanosine-3'-phosphate
  modified_base 10: mod_base = OTHER; note = guanosine-3'-phosphate
  modified_base 11: mod_base = OTHER; note = guanosine-3'-phosphate
  modified_base 12: mod_base = OTHER; note = cytidine-3'-phosphate
  modified_base 13: mod_base = OTHER; note = uridine-3'-phosphate
  modified_base 14: mod_base = OTHER; note = uridine-3'-phosphate
  modified_base 15: mod_base = OTHER; note = cytidine-3'-phosphate
  modified_base 16: mod_base = OTHER; note = uridine-3'-phosphate
  modified_base 17: mod_base = OTHER; note = uridine-3'-phosphate
  modified_base 18: mod_base = OTHER; note = uridine-3'-phosphate
  modified_base 19: mod_base = OTHER; note = adenosine-3'-phosphate
  misc_feature 1..19: note = RNA
  misc_feature 20..21: note = DNA
tatctggagggcttctttatt

SEQ ID NO: 2819 - DNA, 21 bp, synthetic construct
  source 1..21: mol_type = other DNA
  modified_base 1: mod_base = OTHER; note = adenosine-3'-phosphate
  modified_base 2: mod_base = OTHER; note = uridine-3'-phosphate
  modified_base 3: mod_base = OTHER; note = uridine-3'-phosphate
  modified_base 4: mod_base = OTHER; note = guanosine-3'-phosphate
  modified_base 5: mod_base = OTHER; note = uridine-3'-phosphate
  modified_base 6: mod_base = OTHER; note = adenosine-3'-phosphate
  modified_base 7: mod_base = OTHER; note = uridine-3'-phosphate
  modified_base 8: mod_base = OTHER; note = uridine-3'-phosphate
  modified_base 9: mod_base = OTHER; note = uridine-3'-phosphate
  modified_base 10: mod_base = OTHER; note = uridine-3'-phosphate
  modified_base 11: mod_base = OTHER; note = adenosine-3'-phosphate
  modified_base 12: mod_base = OTHER; note = uridine-3'-phosphate
  modified_base 13: mod_base = OTHER; note = cytidine-3'-phosphate
  modified_base 14: mod_base = OTHER; note = uridine-3'-phosphate
  modified_base 15: mod_base = OTHER; note = guanosine-3'-phosphate
  modified_base 16: mod_base = OTHER; note = guanosine-3'-phosphate
  modified_base 17: mod_base = OTHER; note = adenosine-3'-phosphate
  modified_base 18: mod_base = OTHER; note = guanosine-3'-phosphate
  modified_base 19: mod_base = OTHER; note = guanosine-3'-phosphate
  misc_feature 1..19: note = RNA
  misc_feature 20..21: note = DNA
attgtattttatctggaggtt

SEQ ID NO: 2820 - DNA, 21 bp, synthetic construct
  source 1..21: mol_type = other DNA
  modified_base 1: mod_base = OTHER; note = uridine-3'-phosphate
  modified_base 2: mod_base = OTHER; note = guanosine-3'-phosphate
  modified_base 3: mod_base = OTHER; note = adenosine-3'-phosphate
  modified_base 4: mod_base = OTHER; note = adenosine-3'-phosphate
  modified_base 5: mod_base = OTHER; note = adenosine-3'-phosphate
  modified_base 6: mod_base = OTHER; note = cytidine-3'-phosphate
  modified_base 7: mod_base = OTHER; note = uridine-3'-phosphate
  modified_base 8: mod_base = OTHER; note = guanosine-3'-phosphate
  modified_base 9: mod_base = OTHER; note = adenosine-3'-phosphate
  modified_base 10: mod_base = OTHER; note = adenosine-3'-phosphate
  modified_base 11: mod_base = OTHER; note = adenosine-3'-phosphate
  modified_base 12: mod_base = OTHER; note = uridine-3'-phosphate
  modified_base 13: mod_base = OTHER; note = uridine-3'-phosphate
  modified_base 14: mod_base = OTHER; note = guanosine-3'-phosphate
  modified_base 15: mod_base = OTHER; note = uridine-3'-phosphate
  modified_base 16: mod_base = OTHER; note = adenosine-3'-phosphate
  modified_base 17: mod_base = OTHER; note = uridine-3'-phosphate
  modified_base 18: mod_base = OTHER; note = uridine-3'-phosphate
  modified_base 19: mod_base = OTHER; note = uridine-3'-phosphate
  misc_feature 1..19: note = RNA
  misc_feature 20..21: note = DNA
tgaaactgaaattgtattttt

SEQ ID NO: 2821 - DNA, 21 bp, synthetic construct
  source 1..21: mol_type = other DNA
  modified_base 1: mod_base = OTHER; note = guanosine-3'-phosphate
  modified_base 2: mod_base = OTHER; note = uridine-3'-phosphate
  modified_base 3: mod_base = OTHER; note = adenosine-3'-phosphate
  modified_base 4: mod_base = OTHER; note = guanosine-3'-phosphate
  modified_base 5: mod_base = OTHER; note = adenosine-3'-phosphate
  modified_base 6: mod_base = OTHER; note = uridine-3'-phosphate
  modified_base 7: mod_base = OTHER; note = guanosine-3'-phosphate
  modified_base 8: mod_base = OTHER; note = uridine-3'-phosphate
  modified_base 9: mod_base = OTHER; note = adenosine-3'-phosphate
  modified_base 10: mod_base = OTHER; note = cytidine-3'-phosphate
  modified_base 11: mod_base = OTHER; note = cytidine-3'-phosphate
  modified_base 12: mod_base = OTHER; note = uridine-3'-phosphate
  modified_base 13: mod_base = OTHER; note = guanosine-3'-phosphate
  modified_base 14: mod_base = OTHER; note = adenosine-3'-phosphate
  modified_base 15: mod_base = OTHER; note = adenosine-3'-phosphate
  modified_base 16: mod_base = OTHER; note = adenosine-3'-phosphate
  modified_base 17: mod_base = OTHER; note = cytidine-3'-phosphate
  modified_base 18: mod_base = OTHER; note = uridine-3'-phosphate
  modified_base 19: mod_base = OTHER; note = guanosine-3'-phosphate
  misc_feature 1..19: note = RNA
  misc_feature 20..21: note = DNA
gtagatgtacctgaaactgtt

SEQ ID NO: 2822 - DNA, 21 bp, synthetic construct
  source 1..21: mol_type = other DNA
  modified_base 1: mod_base = OTHER; note = uridine-3'-phosphate
  modified_base 2: mod_base = OTHER; note = cytidine-3'-phosphate
  modified_base 3: mod_base = OTHER; note = uridine-3'-phosphate
  modified_base 4: mod_base = OTHER; note = adenosine-3'-phosphate
  modified_base 5: mod_base = OTHER; note = adenosine-3'-phosphate
  modified_base 6: mod_base = OTHER; note = adenosine-3'-phosphate
  modified_base 7: mod_base = OTHER; note = guanosine-3'-phosphate
  modified_base 8: mod_base = OTHER; note = guanosine-3'-phosphate
  modified_base 9: mod_base = OTHER; note = guanosine-3'-phosphate
  modified_base 10: mod_base = OTHER; note = uridine-3'-phosphate
  modified_base 11: mod_base = OTHER; note = adenosine-3'-phosphate
  modified_base 12: mod_base = OTHER; note = guanosine-3'-phosphate
  modified_base 13: mod_base = OTHER; note = adenosine-3'-phosphate
  modified_base 14: mod_base = OTHER; note = uridine-3'-phosphate
  modified_base 15: mod_base = OTHER; note = guanosine-3'-phosphate
  modified_base 16: mod_base = OTHER; note = uridine-3'-phosphate
  modified_base 17: mod_base = OTHER; note = adenosine-3'-phosphate
  modified_base 18: mod_base = OTHER; note = cytidine-3'-phosphate
  modified_base 19: mod_base = OTHER; note = cytidine-3'-phosphate
  misc_feature 1..19: note = RNA
  misc_feature 20..21: note = DNA
tctaaagggtagatgtacctt

SEQ ID NO: 2823 - DNA, 21 bp, synthetic construct
  source 1..21: mol_type = other DNA
  modified_base 1: mod_base = OTHER; note = adenosine-3'-phosphate
  modified_base 2: mod_base = OTHER; note = guanosine-3'-phosphate
  modified_base 3: mod_base = OTHER; note = guanosine-3'-phosphate
  modified_base 4: mod_base = OTHER; note = uridine-3'-phosphate
  modified_base 5: mod_base = OTHER; note = cytidine-3'-phosphate
  modified_base 6: mod_base = OTHER; note = adenosine-3'-phosphate
  modified_base 7: mod_base = OTHER; note = adenosine-3'-phosphate
  modified_base 8: mod_base = OTHER; note = guanosine-3'-phosphate
  modified_base 9: mod_base = OTHER; note = guanosine-3'-phosphate
  modified_base 10: mod_base = OTHER; note = adenosine-3'-phosphate
  modified_base 11: mod_base = OTHER; note = adenosine-3'-phosphate
  modified_base 12: mod_base = OTHER; note = uridine-3'-phosphate
  modified_base 13: mod_base = OTHER; note = cytidine-3'-phosphate
  modified_base 14: mod_base = OTHER; note = uridine-3'-phosphate
  modified_base 15: mod_base = OTHER; note = adenosine-3'-phosphate
  modified_base 16: mod_base = OTHER; note = adenosine-3'-phosphate
  modified_base 17: mod_base = OTHER; note = adenosine-3'-phosphate
  modified_base 18: mod_base = OTHER; note = guanosine-3'-phosphate
  modified_base 19: mod_base = OTHER; note = guanosine-3'-phosphate
  misc_feature 1..19: note = RNA
  misc_feature 20..21: note = DNA
aggtcaaggaatctaaaggtt

SEQ ID NO: 2824 - DNA, 21 bp, synthetic construct
  source 1..21: mol_type = other DNA
  modified_base 1: mod_base = OTHER; note = uridine-3'-phosphate
  modified_base 2: mod_base = OTHER; note = adenosine-3'-phosphate
  modified_base 3: mod_base = OTHER; note = uridine-3'-phosphate
  modified_base 4: mod_base = OTHER; note = uridine-3'-phosphate
  modified_base 5: mod_base = OTHER; note = cytidine-3'-phosphate
  modified_base 6: mod_base = OTHER; note = adenosine-3'-phosphate
  modified_base 7: mod_base = OTHER; note = adenosine-3'-phosphate
  modified_base 8: mod_base = OTHER; note = uridine-3'-phosphate
  modified_base 9: mod_base = OTHER; note = cytidine-3'-phosphate
  modified_base 10: mod_base = OTHER; note = cytidine-3'-phosphate
  modified_base 11: mod_base = OTHER; note = adenosine-3'-phosphate
  modified_base 12: mod_base = OTHER; note = guanosine-3'-phosphate
  modified_base 13: mod_base = OTHER; note = guanosine-3'-phosphate
  modified_base 14: mod_base = OTHER; note = uridine-3'-phosphate
  modified_base 15: mod_base = OTHER; note = cytidine-3'-phosphate
  modified_base 16: mod_base = OTHER; note = adenosine-3'-phosphate
  modified_base 17: mod_base = OTHER; note = adenosine-3'-phosphate
  modified_base 18: mod_base = OTHER; note = guanosine-3'-phosphate
  modified_base 19: mod_base = OTHER; note = guanosine-3'-phosphate
  misc_feature 1..19: note = RNA
  misc_feature 20..21: note = DNA
tattcaatccaggtcaaggtt

SEQ ID NO: 2825 - DNA, 21 bp, synthetic construct
  source 1..21: mol_type = other DNA
  modified_base 1: mod_base = OTHER; note = cytidine-3'-phosphate
  modified_base 2: mod_base = OTHER; note = uridine-3'-phosphate
  modified_base 3: mod_base = OTHER; note = adenosine-3'-phosphate
  modified_base 4: mod_base = OTHER; note = guanosine-3'-phosphate
  modified_base 5: mod_base = OTHER; note = guanosine-3'-phosphate
  modified_base 6: mod_base = OTHER; note = cytidine-3'-phosphate
  modified_base 7: mod_base = OTHER; note = cytidine-3'-phosphate
  modified_base 8: mod_base = OTHER; note = adenosine-3'-phosphate
  modified_base 9: mod_base = OTHER; note = guanosine-3'-phosphate
  modified_base 10: mod_base = OTHER; note = uridine-3'-phosphate
  modified_base 11: mod_base = OTHER; note = adenosine-3'-phosphate
  modified_base 12: mod_base = OTHER; note = uridine-3'-phosphate
  modified_base 13: mod_base = OTHER; note = uridine-3'-phosphate
  modified_base 14: mod_base = OTHER; note = cytidine-3'-phosphate
  modified_base 15: mod_base = OTHER; note = adenosine-3'-phosphate
  modified_base 16: mod_base = OTHER; note = adenosine-3'-phosphate
  modified_base 17: mod_base = OTHER; note = uridine-3'-phosphate
  modified_base 18: mod_base = OTHER; note = cytidine-3'-phosphate
  modified_base 19: mod_base = OTHER; note = cytidine-3'-phosphate
  misc_feature 1..19: note = RNA
  misc_feature 20..21: note = DNA
ctaggccagtattcaatcctt

SEQ ID NO: 2826 - DNA, 21 bp, synthetic construct
  source 1..21: mol_type = other DNA
  modified_base 1: mod_base = OTHER; note = uridine-3'-phosphate
  modified_base 2: mod_base = OTHER; note = guanosine-3'-phosphate
  modified_base 3: mod_base = OTHER; note = uridine-3'-phosphate
  modified_base 4: mod_base = OTHER; note = uridine-3'-phosphate
  modified_base 5: mod_base = OTHER; note = guanosine-3'-phosphate
  modified_base 6: mod_base = OTHER; note = uridine-3'-phosphate
  modified_base 7: mod_base = OTHER; note = guanosine-3'-phosphate
  modified_base 8: mod_base = OTHER; note = uridine-3'-phosphate
  modified_base 9: mod_base = OTHER; note = cytidine-3'-phosphate
  modified_base 10: mod_base = OTHER; note = uridine-3'-phosphate
  modified_base 11: mod_base = OTHER; note = cytidine-3'-phosphate
  modified_base 12: mod_base = OTHER; note = uridine-3'-phosphate
  modified_base 13: mod_base = OTHER; note = adenosine-3'-phosphate
  modified_base 14: mod_base = OTHER; note = guanosine-3'-phosphate
  modified_base 15: mod_base = OTHER; note = guanosine-3'-phosphate
  modified_base 16: mod_base = OTHER; note = cytidine-3'-phosphate
  modified_base 17: mod_base = OTHER; note = cytidine-3'-phosphate
  modified_base 18: mod_base = OTHER; note = adenosine-3'-phosphate
  modified_base 19: mod_base = OTHER; note = guanosine-3'-phosphate
  misc_feature 1..19: note = RNA
  misc_feature 20..21: note = DNA
tgttgtgtctctaggccagtt

SEQ ID NO: 2827 - DNA, 21 bp, synthetic construct
  source 1..21: mol_type = other DNA
  modified_base 1: mod_base = OTHER; note = guanosine-3'-phosphate
  modified_base 2: mod_base = OTHER; note = adenosine-3'-phosphate
  modified_base 3: mod_base = OTHER; note = uridine-3'-phosphate
  modified_base 4: mod_base = OTHER; note = guanosine-3'-phosphate
  modified_base 5: mod_base = OTHER; note = adenosine-3'-phosphate
  modified_base 6: mod_base = OTHER; note = adenosine-3'-phosphate
  modified_base 7: mod_base = OTHER; note = cytidine-3'-phosphate
  modified_base 8: mod_base = OTHER; note = adenosine-3'-phosphate
  modified_base 9: mod_base = OTHER; note = uridine-3'-phosphate
  modified_base 10: mod_base = OTHER; note = guanosine-3'-phosphate
  modified_base 11: mod_base = OTHER; note = uridine-3'-phosphate
  modified_base 12: mod_base = OTHER; note = uridine-3'-phosphate
  modified_base 13: mod_base = OTHER; note = guanosine-3'-phosphate
  modified_base 14: mod_base = OTHER; note = uridine-3'-phosphate
  modified_base 15: mod_base = OTHER; note = guanosine-3'-phosphate
  modified_base 16: mod_base = OTHER; note = uridine-3'-phosphate
  modified_base 17: mod_base = OTHER; note = cytidine-3'-phosphate
  modified_base 18: mod_base = OTHER; note = uridine-3'-phosphate
  modified_base 19: mod_base = OTHER; note = cytidine-3'-phosphate
  misc_feature 1..19: note = RNA
  misc_feature 20..21: note = DNA
gatgaacatgttgtgtctctt

SEQ ID NO: 2828 - DNA, 21 bp, synthetic construct
  source 1..21: mol_type = other DNA
  modified_base 1: mod_base = OTHER; note = adenosine-3'-phosphate
  modified_base 2: mod_base = OTHER; note = adenosine-3'-phosphate
  modified_base 3: mod_base = OTHER; note = uridine-3'-phosphate
  modified_base 4: mod_base = OTHER; note = guanosine-3'-phosphate
  modified_base 5: mod_base = OTHER; note = cytidine-3'-phosphate
  modified_base 6: mod_base = OTHER; note = uridine-3'-phosphate
  modified_base 7: mod_base = OTHER; note = uridine-3'-phosphate
  modified_base 8: mod_base = OTHER; note = guanosine-3'-phosphate
  modified_base 9: mod_base = OTHER; note = adenosine-3'-phosphate
  modified_base 10: mod_base = OTHER; note = cytidine-3'-phosphate
  modified_base 11: mod_base = OTHER; note = adenosine-3'-phosphate
  modified_base 12: mod_base = OTHER; note = cytidine-3'-phosphate
  modified_base 13: mod_base = OTHER; note = guanosine-3'-phosphate
  modified_base 14: mod_base = OTHER; note = adenosine-3'-phosphate
  modified_base 15: mod_base = OTHER; note = uridine-3'-phosphate
  modified_base 16: mod_base = OTHER; note = guanosine-3'-phosphate
  modified_base 17: mod_base = OTHER; note = adenosine-3'-phosphate
  modified_base 18: mod_base = OTHER; note = adenosine-3'-phosphate
  modified_base 19: mod_base = OTHER; note = cytidine-3'-phosphate
  misc_feature 1..19: note = RNA
  misc_feature 20..21: note = DNA
aatgcttgacacgatgaactt

SEQ ID NO: 2829 - DNA, 21 bp, synthetic construct
  source 1..21: mol_type = other DNA
  modified_base 1: mod_base = OTHER; note = uridine-3'-phosphate
  modified_base 2: mod_base = OTHER; note = uridine-3'-phosphate
  modified_base 3: mod_base = OTHER; note = adenosine-3'-phosphate
  modified_base 4: mod_base = OTHER; note = guanosine-3'-phosphate
  modified_base 5: mod_base = OTHER; note = cytidine-3'-phosphate
  modified_base 6: mod_base = OTHER; note = uridine-3'-phosphate
  modified_base 7: mod_base = OTHER; note = adenosine-3'-phosphate
  modified_base 8: mod_base = OTHER; note = adenosine-3'-phosphate
  modified_base 9: mod_base = OTHER; note = adenosine-3'-phosphate
  modified_base 10: mod_base = OTHER; note = adenosine-3'-phosphate
  modified_base 11: mod_base = OTHER; note = adenosine-3'-phosphate
  modified_base 12: mod_base = OTHER; note = uridine-3'-phosphate
  modified_base 13: mod_base = OTHER; note = guanosine-3'-phosphate
  modified_base 14: mod_base = OTHER; note = cytidine-3'-phosphate
  modified_base 15: mod_base = OTHER; note = uridine-3'-phosphate
  modified_base 16: mod_base = OTHER; note = uridine-3'-phosphate
  modified_base 17: mod_base = OTHER; note = guanosine-3'-phosphate
  modified_base 18: mod_base = OTHER; note = adenosine-3'-phosphate
  modified_base 19: mod_base = OTHER; note = cytidine-3'-phosphate
  misc_feature 1..19: note = RNA
  misc_feature 20..21: note = DNA
ttagctaaaaatgcttgactt

SEQ ID NO: 2830 - DNA, 21 bp, synthetic construct
  source 1..21: mol_type = other DNA
  modified_base 1: mod_base = OTHER; note = adenosine-3'-phosphate
  modified_base 2: mod_base = OTHER; note = adenosine-3'-phosphate
  modified_base 3: mod_base = OTHER; note = adenosine-3'-phosphate
  modified_base 4: mod_base = OTHER; note = uridine-3'-phosphate
  modified_base 5: mod_base = OTHER; note = uridine-3'-phosphate
  modified_base 6: mod_base = OTHER; note = cytidine-3'-phosphate
  modified_base 7: mod_base = OTHER; note = adenosine-3'-phosphate
  modified_base 8: mod_base = OTHER; note = uridine-3'-phosphate
  modified_base 9: mod_base = OTHER; note = cytidine-3'-phosphate
  modified_base 10: mod_base = OTHER; note = uridine-3'-phosphate
  modified_base 11: mod_base = OTHER; note = adenosine-3'-phosphate
  modified_base 12: mod_base = OTHER; note = adenosine-3'-phosphate
  modified_base 13: mod_base = OTHER; note = adenosine-3'-phosphate
  modified_base 14: mod_base = OTHER; note = uridine-3'-phosphate
  modified_base 15: mod_base = OTHER; note = uridine-3'-phosphate
  modified_base 16: mod_base = OTHER; note = adenosine-3'-phosphate
  modified_base 17: mod_base = OTHER; note = guanosine-3'-phosphate
  modified_base 18: mod_base = OTHER; note = cytidine-3'-phosphate
  modified_base 19: mod_base = OTHER; note = uridine-3'-phosphate
  misc_feature 1..19: note = RNA
  misc_feature 20..21: note = DNA
aaattcatctaaattagcttt

SEQ ID NO: 2831 - DNA, 21 bp, synthetic construct
  source 1..21: mol_type = other DNA
  modified_base 1: mod_base = OTHER; note = adenosine-3'-phosphate
  modified_base 2: mod_base = OTHER; note = uridine-3'-phosphate
  modified_base 3: mod_base = OTHER; note = cytidine-3'-phosphate
  modified_base 4: mod_base = OTHER; note = uridine-3'-phosphate
  modified_base 5: mod_base = OTHER; note = uridine-3'-phosphate
  modified_base 6: mod_base = OTHER; note = cytidine-3'-phosphate
  modified_base 7: mod_base = OTHER; note = guanosine-3'-phosphate
  modified_base 8: mod_base = OTHER; note = guanosine-3'-phosphate
  modified_base 9: mod_base = OTHER; note = cytidine-3'-phosphate
  modified_base 10: mod_base = OTHER; note = adenosine-3'-phosphate
  modified_base 11: mod_base = OTHER; note = adenosine-3'-phosphate
  modified_base 12: mod_base = OTHER; note = adenosine-3'-phosphate
  modified_base 13: mod_base = OTHER; note = uridine-3'-phosphate
  modified_base 14: mod_base = OTHER; note = uridine-3'-phosphate
  modified_base 15: mod_base = OTHER; note = cytidine-3'-phosphate
  modified_base 16: mod_base = OTHER; note = adenosine-3'-phosphate
  modified_base 17: mod_base = OTHER; note = uridine-3'-phosphate
  modified_base 18: mod_base = OTHER; note = cytidine-3'-phosphate
  modified_base 19: mod_base = OTHER; note = uridine-3'-phosphate
  misc_feature 1..19: note = RNA
  misc_feature 20..21: note = DNA
atcttcggcaaattcatcttt

SEQ ID NO: 2832 - DNA, 21 bp, synthetic construct
  source 1..21: mol_type = other DNA
  modified_base 1: mod_base = OTHER; note = uridine-3'-phosphate
  modified_base 2: mod_base = OTHER; note = uridine-3'-phosphate
  modified_base 3: mod_base = OTHER; note = uridine-3'-phosphate
  modified_base 4: mod_base = OTHER; note = adenosine-3'-phosphate
  modified_base 5: mod_base = OTHER; note = adenosine-3'-phosphate
  modified_base 6: mod_base = OTHER; note = adenosine-3'-phosphate
  modified_base 7: mod_base = OTHER; note = adenosine-3'-phosphate
  modified_base 8: mod_base = OTHER; note = adenosine-3'-phosphate
  modified_base 9: mod_base = OTHER; note = guanosine-3'-phosphate
  modified_base 10: mod_base = OTHER; note = adenosine-3'-phosphate
  modified_base 11: mod_base = OTHER; note = uridine-3'-phosphate
  modified_base 12: mod_base = OTHER; note = adenosine-3'-phosphate
  modified_base 13: mod_base = OTHER; note = uridine-3'-phosphate
  modified_base 14: mod_base = OTHER; note = cytidine-3'-phosphate
  modified_base 15: mod_base = OTHER; note = uridine-3'-phosphate
  modified_base 16: mod_base = OTHER; note = uridine-3'-phosphate
  modified_base 17: mod_base = OTHER; note = cytidine-3'-phosphate
  modified_base 18: mod_base = OTHER; note = guanosine-3'-phosphate
  modified_base 19: mod_base = OTHER; note = guanosine-3'-phosphate
  misc_feature 1..19: note = RNA
  misc_feature 20..21: note = DNA
tttaaaaagatatcttcggtt

SEQ ID NO: 2833 - DNA, 21 bp, synthetic construct
  source 1..21: mol_type = other DNA
  modified_base 1: mod_base = OTHER; note = uridine-3'-phosphate
  modified_base 2: mod_base = OTHER; note = uridine-3'-phosphate
  modified_base 3: mod_base = OTHER; note = adenosine-3'-phosphate
  modified_base 4: mod_base = OTHER; note = guanosine-3'-phosphate
  modified_base 5: mod_base = OTHER; note = cytidine-3'-phosphate
  modified_base 6: mod_base = OTHER; note = adenosine-3'-phosphate
  modified_base 7: mod_base = OTHER; note = uridine-3'-phosphate
  modified_base 8: mod_base = OTHER; note = cytidine-3'-phosphate
  modified_base 9: mod_base = OTHER; note = cytidine-3'-phosphate
  modified_base 10: mod_base = OTHER; note = adenosine-3'-phosphate
  modified_base 11: mod_base = OTHER; note = uridine-3'-phosphate
  modified_base 12: mod_base = OTHER; note = uridine-3'-phosphate
  modified_base 13: mod_base = OTHER; note = uridine-3'-phosphate
  modified_base 14: mod_base = OTHER; note = adenosine-3'-phosphate
  modified_base 15: mod_base = OTHER; note = adenosine-3'-phosphate
  modified_base 16: mod_base = OTHER; note = adenosine-3'-phosphate
  modified_base 17: mod_base = OTHER; note = adenosine-3'-phosphate
  modified_base 18: mod_base = OTHER; note = adenosine-3'-phosphate
  modified_base 19: mod_base = OTHER; note = guanosine-3'-phosphate
  misc_feature 1..19: note = RNA
  misc_feature 20..21: note = DNA
ttagcatccatttaaaaagtt

SEQ ID NO: 2834 - DNA, 21 bp, synthetic construct
  source 1..21: mol_type = other DNA
  modified_base 1: mod_base = OTHER; note = uridine-3'-phosphate
  modified_base 2: mod_base = OTHER; note = uridine-3'-phosphate
  modified_base 3: mod_base = OTHER; note = cytidine-3'-phosphate
  modified_base 4: mod_base = OTHER; note = adenosine-3'-phosphate
  modified_base 5: mod_base = OTHER; note = guanosine-3'-phosphate
  modified_base 6: mod_base = OTHER; note = guanosine-3'-phosphate
  modified_base 7: mod_base = OTHER; note = adenosine-3'-phosphate
  modified_base 8: mod_base = OTHER; note = adenosine-3'-phosphate
  modified_base 9: mod_base = OTHER; note = uridine-3'-phosphate
  modified_base 10: mod_base = OTHER; note = uridine-3'-phosphate
  modified_base 11: mod_base = OTHER; note = uridine-3'-phosphate
  modified_base 12: mod_base = OTHER; note = uridine-3'-phosphate
  modified_base 13: mod_base = OTHER; note = adenosine-3'-phosphate
  modified_base 14: mod_base = OTHER; note = guanosine-3'-phosphate
  modified_base 15: mod_base = OTHER; note = cytidine-3'-phosphate
  modified_base 16: mod_base = OTHER; note = adenosine-3'-phosphate
  modified_base 17: mod_base = OTHER; note = uridine-3'-phosphate
  modified_base 18: mod_base = OTHER; note = cytidine-3'-phosphate
  modified_base 19: mod_base = OTHER; note = cytidine-3'-phosphate
  misc_feature 1..19: note = RNA
  misc_feature 20..21: note = DNA
ttcaggaattttagcatcctt

SEQ ID NO: 2835 - DNA, 21 bp, synthetic construct
  source 1..21: mol_type = other DNA
  modified_base 1: mod_base = OTHER; note = cytidine-3'-phosphate
  modified_base 2: mod_base = OTHER; note = uridine-3'-phosphate
  modified_base 3: mod_base = OTHER; note = guanosine-3'-phosphate
  modified_base 4: mod_base = OTHER; note = adenosine-3'-phosphate
  modified_base 5: mod_base = OTHER; note = adenosine-3'-phosphate
  modified_base 6: mod_base = OTHER; note = cytidine-3'-phosphate
  modified_base 7: mod_base = OTHER; note = uridine-3'-phosphate
  modified_base 8: mod_base = OTHER; note = uridine-3'-phosphate
  modified_base 9: mod_base = OTHER; note = cytidine-3'-phosphate
  modified_base 10: mod_base = OTHER; note = adenosine-3'-phosphate
  modified_base 11: mod_base = OTHER; note = guanosine-3'-phosphate
  modified_base 12: mod_base = OTHER; note = guanosine-3'-phosphate
  modified_base 13: mod_base = OTHER; note = adenosine-3'-phosphate
  modified_base 14: mod_base = OTHER; note = adenosine-3'-phosphate
  modified_base 15: mod_base = OTHER; note = uridine-3'-phosphate
  modified_base 16: mod_base = OTHER; note = uridine-3'-phosphate
  modified_base 17: mod_base = OTHER; note = uridine-3'-phosphate
  modified_base 18: mod_base = OTHER; note = uridine-3'-phosphate
  modified_base 19: mod_base = OTHER; note = adenosine-3'-phosphate
  misc_feature 1..19: note = RNA
  misc_feature 20..21: note = DNA
ctgaacttcaggaattttatt

SEQ ID NO: 2836 - DNA, 21 bp, synthetic construct
  source 1..21: mol_type = other DNA
  modified_base 1: mod_base = OTHER; note = adenosine-3'-phosphate
  modified_base 2: mod_base = OTHER; note = adenosine-3'-phosphate
  modified_base 3: mod_base = OTHER; note = cytidine-3'-phosphate
  modified_base 4: mod_base = OTHER; note = uridine-3'-phosphate
  modified_base 5: mod_base = OTHER; note = guanosine-3'-phosphate
  modified_base 6: mod_base = OTHER; note = uridine-3'-phosphate
  modified_base 7: mod_base = OTHER; note = adenosine-3'-phosphate
  modified_base 8: mod_base = OTHER; note = uridine-3'-phosphate
  modified_base 9: mod_base = OTHER; note = guanosine-3'-phosphate
  modified_base 10: mod_base = OTHER; note = cytidine-3'-phosphate
  modified_base 11: mod_base = OTHER; note = adenosine-3'-phosphate
  modified_base 12: mod_base = OTHER; note = guanosine-3'-phosphate
  modified_base 13: mod_base = OTHER; note = cytidine-3'-phosphate
  modified_base 14: mod_base = OTHER; note = uridine-3'-phosphate
  modified_base 15: mod_base = OTHER; note = guanosine-3'-phosphate
  modified_base 16: mod_base = OTHER; note = adenosine-3'-phosphate
  modified_base 17: mod_base = OTHER; note = adenosine-3'-phosphate
  modified_base 18: mod_base = OTHER; note = cytidine-3'-phosphate
  modified_base 19: mod_base = OTHER; note = uridine-3'-phosphate
  misc_feature 1..19: note = RNA
  misc_feature 20..21: note = DNA
aactgtatgcagctgaacttt

SEQ ID NO: 2837 - DNA, 21 bp, synthetic construct
  source 1..21: mol_type = other DNA
  modified_base 1: mod_base = OTHER; note = adenosine-3'-phosphate
  modified_base 2: mod_base = OTHER; note = uridine-3'-phosphate
  modified_base 3: mod_base = OTHER; note = adenosine-3'-phosphate
  modified_base 4: mod_base = OTHER; note = adenosine-3'-phosphate
  modified_base 5: mod_base = OTHER; note = guanosine-3'-phosphate
  modified_base 6: mod_base = OTHER; note = uridine-3'-phosphate
  modified_base 7: mod_base = OTHER; note = guanosine-3'-phosphate
  modified_base 8: mod_base = OTHER; note = cytidine-3'-phosphate
  modified_base 9: mod_base = OTHER; note = adenosine-3'-phosphate
  modified_base 10: mod_base = OTHER; note = adenosine-3'-phosphate
  modified_base 11: mod_base = OTHER; note = adenosine-3'-phosphate
  modified_base 12: mod_base = OTHER; note = cytidine-3'-phosphate
  modified_base 13: mod_base = OTHER; note = uridine-3'-phosphate
  modified_base 14: mod_base = OTHER; note = guanosine-3'-phosphate
  modified_base 15: mod_base = OTHER; note = uridine-3'-phosphate
  modified_base 16: mod_base = OTHER; note = adenosine-3'-phosphate
  modified_base 17: mod_base = OTHER; note = uridine-3'-phosphate
  modified_base 18: mod_base = OTHER; note = guanosine-3'-phosphate
  modified_base 19: mod_base = OTHER; note = cytidine-3'-phosphate
  misc_feature 1..19: note = RNA
  misc_feature 20..21: note = DNA
ataagtgcaaactgtatgctt

SEQ ID NO: 2838 - DNA, 21 bp, synthetic construct
  source 1..21: mol_type = other DNA
  modified_base 1: mod_base = OTHER; note = adenosine-3'-phosphate
  modified_base 2: mod_base = OTHER; note = cytidine-3'-phosphate
  modified_base 3: mod_base = OTHER; note = adenosine-3'-phosphate
  modified_base 4: mod_base = OTHER; note = adenosine-3'-phosphate
  modified_base 5: mod_base = OTHER; note = cytidine-3'-phosphate
  modified_base 6: mod_base = OTHER; note = adenosine-3'-phosphate
  modified_base 7: mod_base = OTHER; note = guanosine-3'-phosphate
  modified_base 8: mod_base = OTHER; note = guanosine-3'-phosphate
  modified_base 9: mod_base = OTHER; note = adenosine-3'-phosphate
  modified_base 10: mod_base = OTHER; note = guanosine-3'-phosphate
  modified_base 11: mod_base = OTHER; note = uridine-3'-phosphate
  modified_base 12: mod_base = OTHER; note = cytidine-3'-phosphate
  modified_base 13: mod_base = OTHER; note = cytidine-3'-phosphate
  modified_base 14: mod_base = OTHER; note = adenosine-3'-phosphate
  modified_base 15: mod_base = OTHER; note = uridine-3'-phosphate
  modified_base 16: mod_base = OTHER; note = adenosine-3'-phosphate
  modified_base 17: mod_base = OTHER; note = adenosine-3'-phosphate
  modified_base 18: mod_base = OTHER; note = guanosine-3'-phosphate
  modified_base 19: mod_base = OTHER; note = uridine-3'-phosphate
  misc_feature 1..19: note = RNA
  misc_feature 20..21: note = DNA
acaacaggagtccataagttt

SEQ ID NO: 2839 - DNA, 21 bp, synthetic construct
  source 1..21: mol_type = other DNA
  modified_base 1: mod_base = OTHER; note = adenosine-3'-phosphate
  modified_base 2: mod_base = OTHER; note = cytidine-3'-phosphate
  modified_base 3: mod_base = OTHER; note = uridine-3'-phosphate
  modified_base 4: mod_base = OTHER; note = uridine-3'-phosphate
  modified_base 5: mod_base = OTHER; note = cytidine-3'-phosphate
  modified_base 6: mod_base = OTHER; note = adenosine-3'-phosphate
  modified_base 7: mod_base = OTHER; note = adenosine-3'-phosphate
  modified_base 8: mod_base = OTHER; note = cytidine-3'-phosphate
  modified_base 9: mod_base = OTHER; note = adenosine-3'-phosphate
  modified_base 10: mod_base = OTHER; note = adenosine-3'-phosphate
  modified_base 11: mod_base = OTHER; note = cytidine-3'-phosphate
  modified_base 12: mod_base = OTHER; note = adenosine-3'-phosphate
  modified_base 13: mod_base = OTHER; note = guanosine-3'-phosphate
  modified_base 14: mod_base = OTHER; note = guanosine-3'-phosphate
  modified_base 15: mod_base = OTHER; note = adenosine-3'-phosphate
  modified_base 16: mod_base = OTHER; note = guanosine-3'-phosphate
  modified_base 17: mod_base = OTHER; note = uridine-3'-phosphate
  modified_base 18: mod_base = OTHER; note = cytidine-3'-phosphate
  modified_base 19: mod_base = OTHER; note = cytidine-3'-phosphate
  misc_feature 1..19: note = RNA
  misc_feature 20..21: note = DNA
acttcaacaacaggagtcctt

SEQ ID NO: 2840 - DNA, 21 bp, synthetic construct
  source 1..21: mol_type = other DNA
  modified_base 1: mod_base = OTHER; note = adenosine-3'-phosphate
  modified_base 2: mod_base = OTHER; note = adenosine-3'-phosphate
  modified_base 3: mod_base = OTHER; note = adenosine-3'-phosphate
  modified_base 4: mod_base = OTHER; note = adenosine-3'-phosphate
  modified_base 5: mod_base = OTHER; note = adenosine-3'-phosphate
  modified_base 6: mod_base = OTHER; note = adenosine-3'-phosphate
  modified_base 7: mod_base = OTHER; note = adenosine-3'-phosphate
  modified_base 8: mod_base = OTHER; note = cytidine-3'-phosphate
  modified_base 9: mod_base = OTHER; note = guanosine-3'-phosphate
  modified_base 10: mod_base = OTHER; note = adenosine-3'-phosphate
  modified_base 11: mod_base = OTHER; note = adenosine-3'-phosphate
  modified_base 12: mod_base = OTHER; note = cytidine-3'-phosphate
  modified_base 13: mod_base = OTHER; note = uridine-3'-phosphate
  modified_base 14: mod_base = OTHER; note = uridine-3'-phosphate
  modified_base 15: mod_base = OTHER; note = cytidine-3'-phosphate
  modified_base 16: mod_base = OTHER; note = adenosine-3'-phosphate
  modified_base 17: mod_base = OTHER; note = adenosine-3'-phosphate
  modified_base 18: mod_base = OTHER; note = cytidine-3'-phosphate
  modified_base 19: mod_base = OTHER; note = adenosine-3'-phosphate
  misc_feature 1..19: note = RNA
  misc_feature 20..21: note = DNA
aaaaaaacgaacttcaacatt

SEQ ID NO: 2841 - DNA, 21 bp, synthetic construct
  source 1..21: mol_type = other DNA
  modified_base 1: mod_base = OTHER; note = adenosine-3'-phosphate
  modified_base 2: mod_base = OTHER; note = adenosine-3'-phosphate
  modified_base 3: mod_base = OTHER; note = adenosine-3'-phosphate
  modified_base 4: mod_base = OTHER; note = adenosine-3'-phosphate
  modified_base 5: mod_base = OTHER; note = guanosine-3'-phosphate
  modified_base 6: mod_base = OTHER; note = adenosine-3'-phosphate
  modified_base 7: mod_base = OTHER; note = adenosine-3'-phosphate
  modified_base 8: mod_base = OTHER; note = guanosine-3'-phosphate
  modified_base 9: mod_base = OTHER; note = adenosine-3'-phosphate
  modified_base 10: mod_base = OTHER; note = adenosine-3'-phosphate
  modified_base 11: mod_base = OTHER; note = adenosine-3'-phosphate
  modified_base 12: mod_base = OTHER; note = adenosine-3'-phosphate
  modified_base 13: mod_base = OTHER; note = cytidine-3'-phosphate
  modified_base 14: mod_base = OTHER; note = adenosine-3'-phosphate
  modified_base 15: mod_base = OTHER; note = adenosine-3'-phosphate
  modified_base 16: mod_base = OTHER; note = adenosine-3'-phosphate
  modified_base 17: mod_base = OTHER; note = adenosine-3'-phosphate
  modified_base 18: mod_base = OTHER; note = adenosine-3'-phosphate
  modified_base 19: mod_base = OTHER; note = adenosine-3'-phosphate
  misc_feature 1..19: note = RNA
  misc_feature 20..21: note = DNA
aaaagaagaaaacaaaaaatt

SEQ ID NO: 2842 - DNA, 21 bp, synthetic construct
  source 1..21: mol_type = other DNA
  modified_base 1: mod_base = OTHER; note = adenosine-3'-phosphate
  modified_base 2: mod_base = OTHER; note = adenosine-3'-phosphate
  modified_base 3: mod_base = OTHER; note = uridine-3'-phosphate
  modified_base 4: mod_base = OTHER; note = guanosine-3'-phosphate
  modified_base 5: mod_base = OTHER; note = uridine-3'-phosphate
  modified_base 6: mod_base = OTHER; note = uridine-3'-phosphate
  modified_base 7: mod_base = OTHER; note = uridine-3'-phosphate
  modified_base 8: mod_base = OTHER; note = adenosine-3'-phosphate
  modified_base 9: mod_base = OTHER; note = adenosine-3'-phosphate
  modified_base 10: mod_base = OTHER; note = adenosine-3'-phosphate
  modified_base 11: mod_base = OTHER; note = adenosine-3'-phosphate
  modified_base 12: mod_base = OTHER; note = adenosine-3'-phosphate
  modified_base 13: mod_base = OTHER; note = adenosine-3'-phosphate
  modified_base 14: mod_base = OTHER; note = adenosine-3'-phosphate
  modified_base 15: mod_base = OTHER; note = guanosine-3'-phosphate
  modified_base 16: mod_base = OTHER; note = adenosine-3'-phosphate
  modified_base 17: mod_base = OTHER; note = adenosine-3'-phosphate
  modified_base 18: mod_base = OTHER; note = guanosine-3'-phosphate
  modified_base 19: mod_base = OTHER; note = adenosine-3'-phosphate
  misc_feature 1..19: note = RNA
  misc_feature 20..21: note = DNA
aatgtttaaaaaaagaagatt

SEQ ID NO: 2843 - DNA, 21 bp, synthetic construct
  source 1..21: mol_type = other DNA
  modified_base 1: mod_base = OTHER; note = adenosine-3'-phosphate
  modified_base 2: mod_base = OTHER; note = guanosine-3'-phosphate
  modified_base 3: mod_base = OTHER; note = cytidine-3'-phosphate
  modified_base 4: mod_base = OTHER; note = uridine-3'-phosphate
  modified_base 5: mod_base = OTHER; note = adenosine-3'-phosphate
  modified_base 6: mod_base = OTHER; note = uridine-3'-phosphate
  modified_base 7: mod_base = OTHER; note = guanosine-3'-phosphate
  modified_base 8: mod_base = OTHER; note = adenosine-3'-phosphate
  modified_base 9: mod_base = OTHER; note = adenosine-3'-phosphate
  modified_base 10: mod_base = OTHER; note = uridine-3'-phosphate
  modified_base 11: mod_base = OTHER; note = guanosine-3'-phosphate
  modified_base 12: mod_base = OTHER; note = uridine-3'-phosphate
  modified_base 13: mod_base = OTHER; note = uridine-3'-phosphate
  modified_base 14: mod_base = OTHER; note = uridine-3'-phosphate
  modified_base 15: mod_base = OTHER; note = adenosine-3'-phosphate
  modified_base 16: mod_base = OTHER; note = adenosine-3'-phosphate
  modified_base 17: mod_base = OTHER; note = adenosine-3'-phosphate
  modified_base 18: mod_base = OTHER; note = adenosine-3'-phosphate
  modified_base 19: mod_base = OTHER; note = adenosine-3'-phosphate
  misc_feature 1..19: note = RNA
  misc_feature 20..21: note = DNA
agctatgaatgtttaaaaatt

SEQ ID NO: 2844 - DNA, 21 bp, synthetic construct
  source 1..21: mol_type = other DNA
  modified_base 1: mod_base = OTHER; note = uridine-3'-phosphate
  modified_base 2: mod_base = OTHER; note = adenosine-3'-phosphate
  modified_base 3: mod_base = OTHER; note = cytidine-3'-phosphate
  modified_base 4: mod_base = OTHER; note = adenosine-3'-phosphate
  modified_base 5: mod_base = OTHER; note = adenosine-3'-phosphate
  modified_base 6: mod_base = OTHER; note = adenosine-3'-phosphate
  modified_base 7: mod_base = OTHER; note = uridine-3'-phosphate
  modified_base 8: mod_base = OTHER; note = adenosine-3'-phosphate
  modified_base 9: mod_base = OTHER; note = adenosine-3'-phosphate
  modified_base 10: mod_base = OTHER; note = guanosine-3'-phosphate
  modified_base 11: mod_base = OTHER; note = adenosine-3'-phosphate
  modified_base 12: mod_base = OTHER; note = cytidine-3'-phosphate
  modified_base 13: mod_base = OTHER; note = cytidine-3'-phosphate
  modified_base 14: mod_base = OTHER; note = adenosine-3'-phosphate
  modified_base 15: mod_base = OTHER; note = guanosine-3'-phosphate
  modified_base 16: mod_base = OTHER; note = cytidine-3'-phosphate
  modified_base 17: mod_base = OTHER; note = uridine-3'-phosphate
  modified_base 18: mod_base = OTHER; note = adenosine-3'-phosphate
  modified_base 19: mod_base = OTHER; note = uridine-3'-phosphate
  misc_feature 1..19: note = RNA
  misc_feature 20..21: note = DNA
tacaaataagaccagctattt

SEQ ID NO: 2845 - DNA, 21 bp, synthetic construct
  source 1..21: mol_type = other DNA
  modified_base 1: mod_base = OTHER; note = uridine-3'-phosphate
  modified_base 2: mod_base = OTHER; note = guanosine-3'-phosphate
  modified_base 3: mod_base = OTHER; note = adenosine-3'-phosphate
  modified_base 4: mod_base = OTHER; note = guanosine-3'-phosphate
  modified_base 5: mod_base = OTHER; note = cytidine-3'-phosphate
  modified_base 6: mod_base = OTHER; note = uridine-3'-phosphate
  modified_base 7: mod_base = OTHER; note = uridine-3'-phosphate
  modified_base 8: mod_base = OTHER; note = uridine-3'-phosphate
  modified_base 9: mod_base = OTHER; note = adenosine-3'-phosphate
  modified_base 10: mod_base = OTHER; note = cytidine-3'-phosphate
  modified_base 11: mod_base = OTHER; note = adenosine-3'-phosphate
  modified_base 12: mod_base = OTHER; note = adenosine-3'-phosphate
  modified_base 13: mod_base = OTHER; note = adenosine-3'-phosphate
  modified_base 14: mod_base = OTHER; note = uridine-3'-phosphate
  modified_base 15: mod_base = OTHER; note = adenosine-3'-phosphate
  modified_base 16: mod_base = OTHER; note = adenosine-3'-phosphate
  modified_base 17: mod_base = OTHER; note = guanosine-3'-phosphate
  modified_base 18: mod_base = OTHER; note = adenosine-3'-phosphate
  modified_base 19: mod_base = OTHER; note = cytidine-3'-phosphate
  misc_feature 1..19: note = RNA
  misc_feature 20..21: note = DNA
tgagctttacaaataagactt

SEQ ID NO: 2846 - DNA, 21 bp, synthetic construct
  source 1..21: mol_type = other DNA
  modified_base 1: mod_base = OTHER; note = uridine-3'-phosphate
  modified_base 2: mod_base = OTHER; note = cytidine-3'-phosphate
  modified_base 3: mod_base = OTHER; note = uridine-3'-phosphate
  modified_base 4: mod_base = OTHER; note = adenosine-3'-phosphate
  modified_base 5: mod_base = OTHER; note = adenosine-3'-phosphate
  modified_base 6: mod_base = OTHER; note = guanosine-3'-phosphate
  modified_base 7: mod_base = OTHER; note = uridine-3'-phosphate
  modified_base 8: mod_base = OTHER; note = adenosine-3'-phosphate
  modified_base 9: mod_base = OTHER; note = adenosine-3'-phosphate
  modified_base 10: mod_base = OTHER; note = adenosine-3'-phosphate
  modified_base 11: mod_base = OTHER; note = guanosine-3'-phosphate
  modified_base 12: mod_base = OTHER; note = uridine-3'-phosphate
  modified_base 13: mod_base = OTHER; note = guanosine-3'-phosphate
  modified_base 14: mod_base = OTHER; note = adenosine-3'-phosphate
  modified_base 15: mod_base = OTHER; note = guanosine-3'-phosphate
  modified_base 16: mod_base = OTHER; note = cytidine-3'-phosphate
  modified_base 17: mod_base = OTHER; note = uridine-3'-phosphate
  modified_base 18: mod_base = OTHER; note = uridine-3'-phosphate
  modified_base 19: mod_base = OTHER; note = uridine-3'-phosphate
  misc_feature 1..19: note = RNA
  misc_feature 20..21: note = DNA
tctaagtaaagtgagcttttt

SEQ ID NO: 2847 - DNA, 21 bp, synthetic construct
  source 1..21: mol_type = other DNA
  modified_base 1: mod_base = OTHER; note = adenosine-3'-phosphate
  modified_base 2: mod_base = OTHER; note = guanosine-3'-phosphate
  modified_base 3: mod_base = OTHER; note = uridine-3'-phosphate
  modified_base 4: mod_base = OTHER; note = guanosine-3'-phosphate
  modified_base 5: mod_base = OTHER; note = cytidine-3'-phosphate
  modified_base 6: mod_base = OTHER; note = cytidine-3'-phosphate
  modified_base 7: mod_base = OTHER; note = adenosine-3'-phosphate
  modified_base 8: mod_base = OTHER; note = cytidine-3'-phosphate
  modified_base 9: mod_base = OTHER; note = uridine-3'-phosphate
  modified_base 10: mod_base = OTHER; note = adenosine-3'-phosphate
  modified_base 11: mod_base = OTHER; note = adenosine-3'-phosphate
  modified_base 12: mod_base = OTHER; note = uridine-3'-phosphate
  modified_base 13: mod_base = OTHER; note = uridine-3'-phosphate
  modified_base 14: mod_base = OTHER; note = cytidine-3'-phosphate
  modified_base 15: mod_base = OTHER; note = uridine-3'-phosphate
  modified_base 16: mod_base = OTHER; note = adenosine-3'-phosphate
  modified_base 17: mod_base = OTHER; note = adenosine-3'-phosphate
  modified_base 18: mod_base = OTHER; note = guanosine-3'-phosphate
  modified_base 19: mod_base = OTHER; note = uridine-3'-phosphate
  misc_feature 1..19: note = RNA
  misc_feature 20..21: note = DNA
agtgccactaattctaagttt

SEQ ID NO: 2848 - DNA, 21 bp, synthetic construct
  source 1..21: mol_type = other DNA
  modified_base 1: mod_base = OTHER; note = adenosine-3'-phosphate
  modified_base 2: mod_base = OTHER; note = adenosine-3'-phosphate
  modified_base 3: mod_base = OTHER; note = uridine-3'-phosphate
  modified_base 4: mod_base = OTHER; note = adenosine-3'-phosphate
  modified_base 5: mod_base = OTHER; note = adenosine-3'-phosphate
  modified_base 6: mod_base = OTHER; note = adenosine-3'-phosphate
  modified_base 7: mod_base = OTHER; note = adenosine-3'-phosphate
  modified_base 8: mod_base = OTHER; note = guanosine-3'-phosphate
  modified_base 9: mod_base = OTHER; note = cytidine-3'-phosphate
  modified_base 10: mod_base = OTHER; note = adenosine-3'-phosphate
  modified_base 11: mod_base = OTHER; note = adenosine-3'-phosphate
  modified_base 12: mod_base = OTHER; note = guanosine-3'-phosphate
  modified_base 13: mod_base = OTHER; note = uridine-3'-phosphate
  modified_base 14: mod_base = OTHER; note = guanosine-3'-phosphate
  modified_base 15: mod_base = OTHER; note = cytidine-3'-phosphate
  modified_base 16: mod_base = OTHER; note = cytidine-3'-phosphate
  modified_base 17: mod_base = OTHER; note = adenosine-3'-phosphate
  modified_base 18: mod_base = OTHER; note = cytidine-3'-phosphate
  modified_base 19: mod_base = OTHER; note = uridine-3'-phosphate
  misc_feature 1..19: note = RNA
  misc_feature 20..21: note = DNA
aataaaagcaagtgccacttt

SEQ ID NO: 2849 - DNA, 21 bp, synthetic construct
  source 1..21: mol_type = other DNA
  modified_base 1: mod_base = OTHER; note = adenosine-3'-phosphate
  modified_base 2: mod_base = OTHER; note = uridine-3'-phosphate
  modified_base 3: mod_base = OTHER; note = cytidine-3'-phosphate
  modified_base 4: mod_base = OTHER; note = adenosine-3'-phosphate
  modified_base 5: mod_base = OTHER; note = uridine-3'-phosphate
  modified_base 6: mod_base = OTHER; note = uridine-3'-phosphate
  modified_base 7: mod_base = OTHER; note = cytidine-3'-phosphate
  modified_base 8: mod_base = OTHER; note = uridine-3'-phosphate
  modified_base 9: mod_base = OTHER; note = cytidine-3'-phosphate
  modified_base 10: mod_base = OTHER; note = uridine-3'-phosphate
  modified_base 11: mod_base = OTHER; note = adenosine-3'-phosphate
  modified_base 12: mod_base = OTHER; note = adenosine-3'-phosphate
  modified_base 13: mod_base = OTHER; note = uridine-3'-phosphate
  modified_base 14: mod_base = OTHER; note = adenosine-3'-phosphate
  modified_base 15: mod_base = OTHER; note = adenosine-3'-phosphate
  modified_base 16: mod_base = OTHER; note = adenosine-3'-phosphate
  modified_base 17: mod_base = OTHER; note = adenosine-3'-phosphate
  modified_base 18: mod_base = OTHER; note = guanosine-3'-phosphate
  modified_base 19: mod_base = OTHER; note = cytidine-3'-phosphate
  misc_feature 1..19: note = RNA
  misc_feature 20..21: note = DNA
atcattctctaataaaagctt

SEQ ID NO: 2850 - DNA, 21 bp, synthetic construct
  source 1..21: mol_type = other DNA
  modified_base 1: mod_base = OTHER; note = adenosine-3'-phosphate
  modified_base 2: mod_base = OTHER; note = guanosine-3'-phosphate
  modified_base 3: mod_base = OTHER; note = cytidine-3'-phosphate
  modified_base 4: mod_base = OTHER; note = adenosine-3'-phosphate
  modified_base 5: mod_base = OTHER; note = uridine-3'-phosphate
  modified_base 6: mod_base = OTHER; note = uridine-3'-phosphate
  modified_base 7: mod_base = OTHER; note = uridine-3'-phosphate
  modified_base 8: mod_base = OTHER; note = guanosine-3'-phosphate
  modified_base 9: mod_base = OTHER; note = adenosine-3'-phosphate
  modified_base 10: mod_base = OTHER; note = adenosine-3'-phosphate
  modified_base 11: mod_base = OTHER; note = adenosine-3'-phosphate
  modified_base 12: mod_base = OTHER; note = uridine-3'-phosphate
  modified_base 13: mod_base = OTHER; note = cytidine-3'-phosphate
  modified_base 14: mod_base = OTHER; note = adenosine-3'-phosphate
  modified_base 15: mod_base = OTHER; note = uridine-3'-phosphate
  modified_base 16: mod_base = OTHER; note = uridine-3'-phosphate
  modified_base 17: mod_base = OTHER; note = cytidine-3'-phosphate
  modified_base 18: mod_base = OTHER; note = uridine-3'-phosphate
  modified_base 19: mod_base = OTHER; note = cytidine-3'-phosphate
  misc_feature 1..19: note = RNA
  misc_feature 20..21: note = DNA
agcatttgaaatcattctctt

SEQ ID NO: 2851 - DNA, 21 bp, synthetic construct
  source 1..21: mol_type = other DNA
  modified_base 1: mod_base = OTHER; note = adenosine-3'-phosphate
  modified_base 2: mod_base = OTHER; note = adenosine-3'-phosphate
  modified_base 3: mod_base = OTHER; note = adenosine-3'-phosphate
  modified_base 4: mod_base = OTHER; note = guanosine-3'-phosphate
  modified_base 5: mod_base = OTHER; note = uridine-3'-phosphate
  modified_base 6: mod_base = OTHER; note = uridine-3'-phosphate
  modified_base 7: mod_base = OTHER; note = adenosine-3'-phosphate
  modified_base 8: mod_base = OTHER; note = cytidine-3'-phosphate
  modified_base 9: mod_base = OTHER; note = adenosine-3'-phosphate
  modified_base 10: mod_base = OTHER; note = guanosine-3'-phosphate
  modified_base 11: mod_base = OTHER; note = cytidine-3'-phosphate
  modified_base 12: mod_base = OTHER; note = adenosine-3'-phosphate
  modified_base 13: mod_base = OTHER; note = uridine-3'-phosphate
  modified_base 14: mod_base = OTHER; note = uridine-3'-phosphate
  modified_base 15: mod_base = OTHER; note = uridine-3'-phosphate
  modified_base 16: mod_base = OTHER; note = guanosine-3'-phosphate
  modified_base 17: mod_base = OTHER; note = adenosine-3'-phosphate
  modified_base 18: mod_base = OTHER; note = adenosine-3'-phosphate
  modified_base 19: mod_base = OTHER; note = adenosine-3'-phosphate
  misc_feature 1..19: note = RNA
  misc_feature 20..21: note = DNA
aaagttacagcatttgaaatt

SEQ ID NO: 2852 - DNA, 21 bp, synthetic construct
  source 1..21: mol_type = other DNA
  modified_base 1: mod_base = OTHER; note = uridine-3'-phosphate
  modified_base 2: mod_base = OTHER; note = guanosine-3'-phosphate
  modified_base 3: mod_base = OTHER; note = uridine-3'-phosphate
  modified_base 4: mod_base = OTHER; note = uridine-3'-phosphate
  modified_base 5: mod_base = OTHER; note = adenosine-3'-phosphate
  modified_base 6: mod_base = OTHER; note = uridine-3'-phosphate
  modified_base 7: mod_base = OTHER; note = uridine-3'-phosphate
  modified_base 8: mod_base = OTHER; note = uridine-3'-phosphate
  modified_base 9: mod_base = OTHER; note = cytidine-3'-phosphate
  modified_base 10: mod_base = OTHER; note = adenosine-3'-phosphate
  modified_base 11: mod_base = OTHER; note = guanosine-3'-phosphate
  modified_base 12: mod_base = OTHER; note = adenosine-3'-phosphate
  modified_base 13: mod_base = OTHER; note = adenosine-3'-phosphate
  modified_base 14: mod_base = OTHER; note = adenosine-3'-phosphate
  modified_base 15: mod_base = OTHER; note = guanosine-3'-phosphate
  modified_base 16: mod_base = OTHER; note = uridine-3'-phosphate
  modified_base 17: mod_base = OTHER; note = uridine-3'-phosphate
  modified_base 18: mod_base = OTHER; note = adenosine-3'-phosphate
  modified_base 19: mod_base = OTHER; note = cytidine-3'-phosphate
  misc_feature 1..19: note = RNA
  misc_feature 20..21: note = DNA
tgttatttcagaaagttactt

SEQ ID NO: 2853 - DNA, 21 bp, synthetic construct
  source 1..21: mol_type = other DNA
  modified_base 1: mod_base = OTHER; note = uridine-3'-phosphate
  modified_base 2: mod_base = OTHER; note = cytidine-3'-phosphate
  modified_base 3: mod_base = OTHER; note = cytidine-3'-phosphate
  modified_base 4: mod_base = OTHER; note = adenosine-3'-phosphate
  modified_base 5: mod_base = OTHER; note = adenosine-3'-phosphate
  modified_base 6: mod_base = OTHER; note = guanosine-3'-phosphate
  modified_base 7: mod_base = OTHER; note = guanosine-3'-phosphate
  modified_base 8: mod_base = OTHER; note = cytidine-3'-phosphate
  modified_base 9: mod_base = OTHER; note = cytidine-3'-phosphate
  modified_base 10: mod_base = OTHER; note = adenosine-3'-phosphate
  modified_base 11: mod_base = OTHER; note = uridine-3'-phosphate
  modified_base 12: mod_base = OTHER; note = guanosine-3'-phosphate
  modified_base 13: mod_base = OTHER; note = uridine-3'-phosphate
  modified_base 14: mod_base = OTHER; note = uridine-3'-phosphate
  modified_base 15: mod_base = OTHER; note = adenosine-3'-phosphate
  modified_base 16: mod_base = OTHER; note = uridine-3'-phosphate
  modified_base 17: mod_base = OTHER; note = uridine-3'-phosphate
  modified_base 18: mod_base = OTHER; note = uridine-3'-phosphate
  modified_base 19: mod_base = OTHER; note = cytidine-3'-phosphate
  misc_feature 1..19: note = RNA
  misc_feature 20..21: note = DNA
tccaaggccatgttatttctt

SEQ ID NO: 2854 - DNA, 21 bp, synthetic construct
  source 1..21: mol_type = other DNA
  modified_base 1: mod_base = OTHER; note = guanosine-3'-phosphate
  modified_base 2: mod_base = OTHER; note = uridine-3'-phosphate
  modified_base 3: mod_base = OTHER; note = cytidine-3'-phosphate
  modified_base 4: mod_base = OTHER; note = uridine-3'-phosphate
  modified_base 5: mod_base = OTHER; note = uridine-3'-phosphate
  modified_base 6: mod_base = OTHER; note = cytidine-3'-phosphate
  modified_base 7: mod_base = OTHER; note = adenosine-3'-phosphate
  modified_base 8: mod_base = OTHER; note = uridine-3'-phosphate
  modified_base 9: mod_base = OTHER; note = guanosine-3'-phosphate
  modified_base 10: mod_base = OTHER; note = cytidine-3'-phosphate
  modified_base 11: mod_base = OTHER; note = cytidine-3'-phosphate
  modified_base 12: mod_base = OTHER; note = cytidine-3'-phosphate
  modified_base 13: mod_base = OTHER; note = uridine-3'-phosphate
  modified_base 14: mod_base = OTHER; note = cytidine-3'-phosphate
  modified_base 15: mod_base = OTHER; note = cytidine-3'-phosphate
  modified_base 16: mod_base = OTHER; note = adenosine-3'-phosphate
  modified_base 17: mod_base = OTHER; note = adenosine-3'-phosphate
  modified_base 18: mod_base = OTHER; note = guanosine-3'-phosphate
  modified_base 19: mod_base = OTHER; note = guanosine-3'-phosphate
  misc_feature 1..19: note = RNA
  misc_feature 20..21: note = DNA
gtcttcatgccctccaaggtt

SEQ ID NO: 2855 - DNA, 21 bp, synthetic construct
  source 1..21: mol_type = other DNA
  modified_base 1: mod_base = OTHER; note = guanosine-3'-phosphate
  modified_base 2: mod_base = OTHER; note = uridine-3'-phosphate
  modified_base 3: mod_base = OTHER; note = adenosine-3'-phosphate
  modified_base 4: mod_base = OTHER; note = uridine-3'-phosphate
  modified_base 5: mod_base = OTHER; note = cytidine-3'-phosphate
  modified_base 6: mod_base = OTHER; note = uridine-3'-phosphate
  modified_base 7: mod_base = OTHER; note = guanosine-3'-phosphate
  modified_base 8: mod_base = OTHER; note = uridine-3'-phosphate
  modified_base 9: mod_base = OTHER; note = cytidine-3'-phosphate
  modified_base 10: mod_base = OTHER; note = uridine-3'-phosphate
  modified_base 11: mod_base = OTHER; note = uridine-3'-phosphate
  modified_base 12: mod_base = OTHER; note = cytidine-3'-phosphate
  modified_base 13: mod_base = OTHER; note = adenosine-3'-phosphate
  modified_base 14: mod_base = OTHER; note = uridine-3'-phosphate
  modified_base 15: mod_base = OTHER; note = guanosine-3'-phosphate
  modified_base 16: mod_base = OTHER; note = cytidine-3'-phosphate
  modified_base 17: mod_base = OTHER; note = cytidine-3'-phosphate
  modified_base 18: mod_base = OTHER; note = cytidine-3'-phosphate
  modified_base 19: mod_base = OTHER; note = uridine-3'-phosphate
  misc_feature 1..19: note = RNA
  misc_feature 20..21: note = DNA
gtatctgtcttcatgcccttt

SEQ ID NO: 2856 - DNA, 21 bp, synthetic construct
  source 1..21: mol_type = other DNA
  modified_base 1: mod_base = OTHER; note = adenosine-3'-phosphate
  modified_base 2: mod_base = OTHER; note = uridine-3'-phosphate
  modified_base 3: mod_base = OTHER; note = adenosine-3'-phosphate
  modified_base 4: mod_base = OTHER; note = adenosine-3'-phosphate
  modified_base 5: mod_base = OTHER; note = cytidine-3'-phosphate
  modified_base 6: mod_base = OTHER; note = cytidine-3'-phosphate
  modified_base 7: mod_base = OTHER; note = uridine-3'-phosphate
  modified_base 8: mod_base = OTHER; note = uridine-3'-phosphate
  modified_base 9: mod_base = OTHER; note = guanosine-3'-phosphate
  modified_base 10: mod_base = OTHER; note = guanosine-3'-phosphate
  modified_base 11: mod_base = OTHER; note = adenosine-3'-phosphate
  modified_base 12: mod_base = OTHER; note = guanosine-3'-phosphate
  modified_base 13: mod_base = OTHER; note = guanosine-3'-phosphate
  modified_base 14: mod_base = OTHER; note = adenosine-3'-phosphate
  modified_base 15: mod_base = OTHER; note = guanosine-3'-phosphate
  modified_base 16: mod_base = OTHER; note = uridine-3'-phosphate
  modified_base 17: mod_base = OTHER; note = adenosine-3'-phosphate
  modified_base 18: mod_base = OTHER; note = uridine-3'-phosphate
  modified_base 19: mod_base = OTHER; note = cytidine-3'-phosphate
  misc_feature 1..19: note = RNA
  misc_feature 20..21: note = DNA
ataaccttggaggagtatctt

SEQ ID NO: 2857 - DNA, 21 bp, synthetic construct
  source 1..21: mol_type = other DNA
  modified_base 1: mod_base = OTHER; note = uridine-3'-phosphate
  modified_base 2: mod_base = OTHER; note = guanosine-3'-phosphate
  modified_base 3: mod_base = OTHER; note = uridine-3'-phosphate
  modified_base 4: mod_base = OTHER; note = cytidine-3'-phosphate
  modified_base 5: mod_base = OTHER; note = cytidine-3'-phosphate
  modified_base 6: mod_base = OTHER; note = adenosine-3'-phosphate
  modified_base 7: mod_base = OTHER; note = adenosine-3'-phosphate
  modified_base 8: mod_base = OTHER; note = uridine-3'-phosphate
  modified_base 9: mod_base = OTHER; note = adenosine-3'-phosphate
  modified_base 10: mod_base = OTHER; note = adenosine-3'-phosphate
  modified_base 11: mod_base = OTHER; note = cytidine-3'-phosphate
  modified_base 12: mod_base = OTHER; note = cytidine-3'-phosphate
  modified_base 13: mod_base = OTHER; note = uridine-3'-phosphate
  modified_base 14: mod_base = OTHER; note = uridine-3'-phosphate
  modified_base 15: mod_base = OTHER; note = guanosine-3'-phosphate
  modified_base 16: mod_base = OTHER; note = guanosine-3'-phosphate
  modified_base 17: mod_base = OTHER; note = adenosine-3'-phosphate
  modified_base 18: mod_base = OTHER; note = guanosine-3'-phosphate
  modified_base 19: mod_base = OTHER; note = guanosine-3'-phosphate
  misc_feature 1..19: note = RNA
  misc_feature 20..21: note = DNA
tgtccaataaccttggaggtt

SEQ ID NO: 2858 - DNA, 21 bp, synthetic construct
  source 1..21: mol_type = other DNA
  modified_base 1: mod_base = OTHER; note = uridine-3'-phosphate
  modified_base 2: mod_base = OTHER; note = uridine-3'-phosphate
  modified_base 3: mod_base = OTHER; note = uridine-3'-phosphate
  modified_base 4: mod_base = OTHER; note = adenosine-3'-phosphate
  modified_base 5: mod_base = OTHER; note = uridine-3'-phosphate
  modified_base 6: mod_base = OTHER; note = uridine-3'-phosphate
  modified_base 7: mod_base = OTHER; note = guanosine-3'-phosphate
  modified_base 8: mod_base = OTHER; note = uridine-3'-phosphate
  modified_base 9: mod_base = OTHER; note = uridine-3'-phosphate
  modified_base 10: mod_base = OTHER; note = uridine-3'-phosphate
  modified_base 11: mod_base = OTHER; note = cytidine-3'-phosphate
  modified_base 12: mod_base = OTHER; note = cytidine-3'-phosphate
  modified_base 13: mod_base = OTHER; note = guanosine-3'-phosphate
  modified_base 14: mod_base = OTHER; note = guanosine-3'-phosphate
  modified_base 15: mod_base = OTHER; note = uridine-3'-phosphate
  modified_base 16: mod_base = OTHER; note = guanosine-3'-phosphate
  modified_base 17: mod_base = OTHER; note = uridine-3'-phosphate
  modified_base 18: mod_base = OTHER; note = cytidine-3'-phosphate
  modified_base 19: mod_base = OTHER; note = cytidine-3'-phosphate
  misc_feature 1..19: note = RNA
  misc_feature 20..21: note = DNA
tttattgtttccggtgtcctt

SEQ ID NO: 2859 - DNA, 21 bp, synthetic construct
  source 1..21: mol_type = other DNA
  modified_base 1: mod_base = OTHER; note = uridine-3'-phosphate
  modified_base 2: mod_base = OTHER; note = guanosine-3'-phosphate
  modified_base 3: mod_base = OTHER; note = uridine-3'-phosphate
  modified_base 4: mod_base = OTHER; note = uridine-3'-phosphate
  modified_base 5: mod_base = OTHER; note = cytidine-3'-phosphate
  modified_base 6: mod_base = OTHER; note = cytidine-3'-phosphate
  modified_base 7: mod_base = OTHER; note = adenosine-3'-phosphate
  modified_base 8: mod_base = OTHER; note = adenosine-3'-phosphate
  modified_base 9: mod_base = OTHER; note = uridine-3'-phosphate
  modified_base 10: mod_base = OTHER; note = uridine-3'-phosphate
  modified_base 11: mod_base = OTHER; note = uridine-3'-phosphate
  modified_base 12: mod_base = OTHER; note = adenosine-3'-phosphate
  modified_base 13: mod_base = OTHER; note = uridine-3'-phosphate
  modified_base 14: mod_base = OTHER; note = uridine-3'-phosphate
  modified_base 15: mod_base = OTHER; note = guanosine-3'-phosphate
  modified_base 16: mod_base = OTHER; note = uridine-3'-phosphate
  modified_base 17: mod_base = OTHER; note = uridine-3'-phosphate
  modified_base 18: mod_base = OTHER; note = uridine-3'-phosphate
  modified_base 19: mod_base = OTHER; note = cytidine-3'-phosphate
  misc_feature 1..19: note = RNA
  misc_feature 20..21: note = DNA
tgttccaatttattgtttctt

SEQ ID NO: 2860 - DNA, 21 bp, synthetic construct
  source 1..21: mol_type = other DNA
  modified_base 1: mod_base = OTHER; note = uridine-3'-phosphate
  modified_base 2: mod_base = OTHER; note = uridine-3'-phosphate
  modified_base 3: mod_base = OTHER; note = uridine-3'-phosphate
  modified_base 4: mod_base = OTHER; note = guanosine-3'-phosphate
  modified_base 5: mod_base = OTHER; note = adenosine-3'-phosphate
  modified_base 6: mod_base = OTHER; note = guanosine-3'-phosphate
  modified_base 7: mod_base = OTHER; note = guanosine-3'-phosphate
  modified_base 8: mod_base = OTHER; note = adenosine-3'-phosphate
  modified_base 9: mod_base = OTHER; note = guanosine-3'-phosphate
  modified_base 10: mod_base = OTHER; note = guanosine-3'-phosphate
  modified_base 11: mod_base = OTHER; note = uridine-3'-phosphate
  modified_base 12: mod_base = OTHER; note = guanosine-3'-phosphate
  modified_base 13: mod_base = OTHER; note = uridine-3'-phosphate
  modified_base 14: mod_base = OTHER; note = uridine-3'-phosphate
  modified_base 15: mod_base = OTHER; note = cytidine-3'-phosphate
  modified_base 16: mod_base = OTHER; note = cytidine-3'-phosphate
  modified_base 17: mod_base = OTHER; note = adenosine-3'-phosphate
  modified_base 18: mod_base = OTHER; note = adenosine-3'-phosphate
  modified_base 19: mod_base = OTHER; note = uridine-3'-phosphate
  misc_feature 1..19: note = RNA
  misc_feature 20..21: note = DNA
tttgaggaggtgttccaattt

SEQ ID NO: 2861 - DNA, 21 bp, synthetic construct
  source 1..21: mol_type = other DNA
  modified_base 1: mod_base = OTHER; note = uridine-3'-phosphate
  modified_base 2: mod_base = OTHER; note = guanosine-3'-phosphate
  modified_base 3: mod_base = OTHER; note = adenosine-3'-phosphate
  modified_base 4: mod_base = OTHER; note = guanosine-3'-phosphate
  modified_base 5: mod_base = OTHER; note = uridine-3'-phosphate
  modified_base 6: mod_base = OTHER; note = guanosine-3'-phosphate
  modified_base 7: mod_base = OTHER; note = guanosine-3'-phosphate
  modified_base 8: mod_base = OTHER; note = uridine-3'-phosphate
  modified_base 9: mod_base = OTHER; note = adenosine-3'-phosphate
  modified_base 10: mod_base = OTHER; note = guanosine-3'-phosphate
  modified_base 11: mod_base = OTHER; note = guanosine-3'-phosphate
  modified_base 12: mod_base = OTHER; note = uridine-3'-phosphate
  modified_base 13: mod_base = OTHER; note = uridine-3'-phosphate
  modified_base 14: mod_base = OTHER; note = uridine-3'-phosphate
  modified_base 15: mod_base = OTHER; note = guanosine-3'-phosphate
  modified_base 16: mod_base = OTHER; note = adenosine-3'-phosphate
  modified_base 17: mod_base = OTHER; note = guanosine-3'-phosphate
  modified_base 18: mod_base = OTHER; note = guanosine-3'-phosphate
  modified_base 19: mod_base = OTHER; note = adenosine-3'-phosphate
  misc_feature 1..19: note = RNA
  misc_feature 20..21: note = DNA
tgagtggtaggtttgaggatt

SEQ ID NO: 2862 - DNA, 21 bp, synthetic construct
  source 1..21: mol_type = other DNA
  modified_base 1: mod_base = OTHER; note = adenosine-3'-phosphate
  modified_base 2: mod_base = OTHER; note = adenosine-3'-phosphate
  modified_base 3: mod_base = OTHER; note = adenosine-3'-phosphate
  modified_base 4: mod_base = OTHER; note = cytidine-3'-phosphate
  modified_base 5: mod_base = OTHER; note = adenosine-3'-phosphate
  modified_base 6: mod_base = OTHER; note = uridine-3'-phosphate
  modified_base 7: mod_base = OTHER; note = uridine-3'-phosphate
  modified_base 8: mod_base = OTHER; note = cytidine-3'-phosphate
  modified_base 9: mod_base = OTHER; note = cytidine-3'-phosphate
  modified_base 10: mod_base = OTHER; note = uridine-3'-phosphate
  modified_base 11: mod_base = OTHER; note = guanosine-3'-phosphate
  modified_base 12: mod_base = OTHER; note = adenosine-3'-phosphate
  modified_base 13: mod_base = OTHER; note = guanosine-3'-phosphate
  modified_base 14: mod_base = OTHER; note = uridine-3'-phosphate
  modified_base 15: mod_base = OTHER; note = guanosine-3'-phosphate
  modified_base 16: mod_base = OTHER; note = guanosine-3'-phosphate
  modified_base 17: mod_base = OTHER; note = uridine-3'-phosphate
  modified_base 18: mod_base = OTHER; note = adenosine-3'-phosphate
  modified_base 19: mod_base = OTHER; note = guanosine-3'-phosphate
  misc_feature 1..19: note = RNA
  misc_feature 20..21: note = DNA
aaacattcctgagtggtagtt

SEQ ID NO: 2863 - DNA, 21 bp, synthetic construct
  source 1..21: mol_type = other DNA
  modified_base 1: mod_base = OTHER; note = uridine-3'-phosphate
  modified_base 2: mod_base = OTHER; note = uridine-3'-phosphate
  modified_base 3: mod_base = OTHER; note = cytidine-3'-phosphate
  modified_base 4: mod_base = OTHER; note = guanosine-3'-phosphate
  modified_base 5: mod_base = OTHER; note = guanosine-3'-phosphate
  modified_base 6: mod_base = OTHER; note = cytidine-3'-phosphate
  modified_base 7: mod_base = OTHER; note = cytidine-3'-phosphate
  modified_base 8: mod_base = OTHER; note = cytidine-3'-phosphate
  modified_base 9: mod_base = OTHER; note = cytidine-3'-phosphate
  modified_base 10: mod_base = OTHER; note = adenosine-3'-phosphate
  modified_base 11: mod_base = OTHER; note = guanosine-3'-phosphate
  modified_base 12: mod_base = OTHER; note = cytidine-3'-phosphate
  modified_base 13: mod_base = OTHER; note = adenosine-3'-phosphate
  modified_base 14: mod_base = OTHER; note = adenosine-3'-phosphate
  modified_base 15: mod_base = OTHER; note = adenosine-3'-phosphate
  modified_base 16: mod_base = OTHER; note = cytidine-3'-phosphate
  modified_base 17: mod_base = OTHER; note = adenosine-3'-phosphate
  modified_base 18: mod_base = OTHER; note = uridine-3'-phosphate
  modified_base 19: mod_base = OTHER; note = uridine-3'-phosphate
  misc_feature 1..19: note = RNA
  misc_feature 20..21: note = DNA
ttcggccccagcaaacatttt

SEQ ID NO: 2864 - DNA, 21 bp, synthetic construct
  source 1..21: mol_type = other DNA
  modified_base 1: mod_base = OTHER; note = uridine-3'-phosphate
  modified_base 2: mod_base = OTHER; note = guanosine-3'-phosphate
  modified_base 3: mod_base = OTHER; note = uridine-3'-phosphate
  modified_base 4: mod_base = OTHER; note = uridine-3'-phosphate
  modified_base 5: mod_base = OTHER; note = cytidine-3'-phosphate
  modified_base 6: mod_base = OTHER; note = uridine-3'-phosphate
  modified_base 7: mod_base = OTHER; note = uridine-3'-phosphate
  modified_base 8: mod_base = OTHER; note = uridine-3'-phosphate
  modified_base 9: mod_base = OTHER; note = cytidine-3'-phosphate
  modified_base 10: mod_base = OTHER; note = guanosine-3'-phosphate
  modified_base 11: mod_base = OTHER; note = guanosine-3'-phosphate
  modified_base 12: mod_base = OTHER; note = cytidine-3'-phosphate
  modified_base 13: mod_base = OTHER; note = cytidine-3'-phosphate
  modified_base 14: mod_base = OTHER; note = cytidine-3'-phosphate
  modified_base 15: mod_base = OTHER; note = cytidine-3'-phosphate
  modified_base 16: mod_base = OTHER; note = adenosine-3'-phosphate
  modified_base 17: mod_base = OTHER; note = guanosine-3'-phosphate
  modified_base 18: mod_base = OTHER; note = cytidine-3'-phosphate
  modified_base 19: mod_base = OTHER; note = adenosine-3'-phosphate
  misc_feature 1..19: note = RNA
  misc_feature 20..21: note = DNA
tgttctttcggccccagcatt

SEQ ID NO: 2865 - DNA, 21 bp, synthetic construct
  source 1..21: mol_type = other DNA
  modified_base 1: mod_base = OTHER; note = uridine-3'-phosphate
  modified_base 2: mod_base = OTHER; note = uridine-3'-phosphate
  modified_base 3: mod_base = OTHER; note = uridine-3'-phosphate
  modified_base 4: mod_base = OTHER; note = cytidine-3'-phosphate
  modified_base 5: mod_base = OTHER; note = adenosine-3'-phosphate
  modified_base 6: mod_base = OTHER; note = adenosine-3'-phosphate
  modified_base 7: mod_base = OTHER; note = uridine-3'-phosphate
  modified_base 8: mod_base = OTHER; note = guanosine-3'-phosphate
  modified_base 9: mod_base = OTHER; note = guanosine-3'-phosphate
  modified_base 10: mod_base = OTHER; note = adenosine-3'-phosphate
  modified_base 11: mod_base = OTHER; note = cytidine-3'-phosphate
  modified_base 12: mod_base = OTHER; note = uridine-3'-phosphate
  modified_base 13: mod_base = OTHER; note = guanosine-3'-phosphate
  modified_base 14: mod_base = OTHER; note = uridine-3'-phosphate
  modified_base 15: mod_base = OTHER; note = uridine-3'-phosphate
  modified_base 16: mod_base = OTHER; note = cytidine-3'-phosphate
  modified_base 17: mod_base = OTHER; note = uridine-3'-phosphate
  modified_base 18: mod_base = OTHER; note = uridine-3'-phosphate
  modified_base 19: mod_base = OTHER; note = uridine-3'-phosphate
  misc_feature 1..19: note = RNA
  misc_feature 20..21: note = DNA
tttcaatggactgttcttttt

SEQ ID NO: 2866 - DNA, 21 bp, synthetic construct
  source 1..21: mol_type = other DNA
  modified_base 1: mod_base = OTHER; note = guanosine-3'-phosphate
  modified_base 2: mod_base = OTHER; note = uridine-3'-phosphate
  modified_base 3: mod_base = OTHER; note = adenosine-3'-phosphate
  modified_base 4: mod_base = OTHER; note = adenosine-3'-phosphate
  modified_base 5: mod_base = OTHER; note = uridine-3'-phosphate
  modified_base 6: mod_base = OTHER; note = adenosine-3'-phosphate
  modified_base 7: mod_base = OTHER; note = cytidine-3'-phosphate
  modified_base 8: mod_base = OTHER; note = uridine-3'-phosphate
  modified_base 9: mod_base = OTHER; note = cytidine-3'-phosphate
  modified_base 10: mod_base = OTHER; note = cytidine-3'-phosphate
  modified_base 11: mod_base = OTHER; note = cytidine-3'-phosphate
  modified_base 12: mod_base = OTHER; note = uridine-3'-phosphate
  modified_base 13: mod_base = OTHER; note = uridine-3'-phosphate
  modified_base 14: mod_base = OTHER; note = uridine-3'-phosphate
  modified_base 15: mod_base = OTHER; note = cytidine-3'-phosphate
  modified_base 16: mod_base = OTHER; note = adenosine-3'-phosphate
  modified_base 17: mod_base = OTHER; note = adenosine-3'-phosphate
  modified_base 18: mod_base = OTHER; note = uridine-3'-phosphate
  modified_base 19: mod_base = OTHER; note = guanosine-3'-phosphate
  misc_feature 1..19: note = RNA
  misc_feature 20..21: note = DNA
gtaatactccctttcaatgtt

SEQ ID NO: 2867 - DNA, 21 bp, synthetic construct
  source 1..21: mol_type = other DNA
  modified_base 1: mod_base = OTHER; note = cytidine-3'-phosphate
  modified_base 2: mod_base = OTHER; note = adenosine-3'-phosphate
  modified_base 3: mod_base = OTHER; note = uridine-3'-phosphate
  modified_base 4: mod_base = OTHER; note = guanosine-3'-phosphate
  modified_base 5: mod_base = OTHER; note = uridine-3'-phosphate
  modified_base 6: mod_base = OTHER; note = uridine-3'-phosphate
  modified_base 7: mod_base = OTHER; note = uridine-3'-phosphate
  modified_base 8: mod_base = OTHER; note = uridine-3'-phosphate
  modified_base 9: mod_base = OTHER; note = uridine-3'-phosphate
  modified_base 10: mod_base = OTHER; note = guanosine-3'-phosphate
  modified_base 11: mod_base = OTHER; note = uridine-3'-phosphate
  modified_base 12: mod_base = OTHER; note = adenosine-3'-phosphate
  modified_base 13: mod_base = OTHER; note = adenosine-3'-phosphate
  modified_base 14: mod_base = OTHER; note = uridine-3'-phosphate
  modified_base 15: mod_base = OTHER; note = adenosine-3'-phosphate
  modified_base 16: mod_base = OTHER; note = cytidine-3'-phosphate
  modified_base 17: mod_base = OTHER; note = uridine-3'-phosphate
  modified_base 18: mod_base = OTHER; note = cytidine-3'-phosphate
  modified_base 19: mod_base = OTHER; note = cytidine-3'-phosphate
  misc_feature 1..19: note = RNA
  misc_feature 20..21: note = DNA
catgtttttgtaatactcctt

SEQ ID NO: 2868 - DNA, 21 bp, synthetic construct
  source 1..21: mol_type = other DNA
  modified_base 1: mod_base = OTHER; note = cytidine-3'-phosphate
  modified_base 2: mod_base = OTHER; note = adenosine-3'-phosphate
  modified_base 3: mod_base = OTHER; note = adenosine-3'-phosphate
  modified_base 4: mod_base = OTHER; note = guanosine-3'-phosphate
  modified_base 5: mod_base = OTHER; note = cytidine-3'-phosphate
  modified_base 6: mod_base = OTHER; note = adenosine-3'-phosphate
  modified_base 7: mod_base = OTHER; note = adenosine-3'-phosphate
  modified_base 8: mod_base = OTHER; note = adenosine-3'-phosphate
  modified_base 9: mod_base = OTHER; note = guanosine-3'-phosphate
  modified_base 10: mod_base = OTHER; note = guanosine-3'-phosphate
  modified_base 11: mod_base = OTHER; note = cytidine-3'-phosphate
  modified_base 12: mod_base = OTHER; note = cytidine-3'-phosphate
  modified_base 13: mod_base = OTHER; note = adenosine-3'-phosphate
  modified_base 14: mod_base = OTHER; note = uridine-3'-phosphate
  modified_base 15: mod_base = OTHER; note = guanosine-3'-phosphate
  modified_base 16: mod_base = OTHER; note = uridine-3'-phosphate
  modified_base 17: mod_base = OTHER; note = uridine-3'-phosphate
  modified_base 18: mod_base = OTHER; note = uridine-3'-phosphate
  modified_base 19: mod_base = OTHER; note = uridine-3'-phosphate
  misc_feature 1..19: note = RNA
  misc_feature 20..21: note = DNA
caagcaaaggccatgtttttt

SEQ ID NO: 2869 - DNA, 21 bp, synthetic construct
  source 1..21: mol_type = other DNA
  modified_base 1: mod_base = OTHER; note = uridine-3'-phosphate
  modified_base 2: mod_base = OTHER; note = uridine-3'-phosphate
  modified_base 3: mod_base = OTHER; note = uridine-3'-phosphate
  modified_base 4: mod_base = OTHER; note = uridine-3'-phosphate
  modified_base 5: mod_base = OTHER; note = cytidine-3'-phosphate
  modified_base 6: mod_base = OTHER; note = uridine-3'-phosphate
  modified_base 7: mod_base = OTHER; note = uridine-3'-phosphate
  modified_base 8: mod_base = OTHER; note = uridine-3'-phosphate
  modified_base 9: mod_base = OTHER; note = cytidine-3'-phosphate
  modified_base 10: mod_base = OTHER; note = adenosine-3'-phosphate
  modified_base 11: mod_base = OTHER; note = adenosine-3'-phosphate
  modified_base 12: mod_base = OTHER; note = guanosine-3'-phosphate
  modified_base 13: mod_base = OTHER; note = cytidine-3'-phosphate
  modified_base 14: mod_base = OTHER; note = adenosine-3'-phosphate
  modified_base 15: mod_base = OTHER; note = adenosine-3'-phosphate
  modified_base 16: mod_base = OTHER; note = adenosine-3'-phosphate
  modified_base 17: mod_base = OTHER; note = guanosine-3'-phosphate
  modified_base 18: mod_base = OTHER; note = guanosine-3'-phosphate
  modified_base 19: mod_base = OTHER; note = cytidine-3'-phosphate
  misc_feature 1..19: note = RNA
  misc_feature 20..21: note = DNA
ttttctttcaagcaaaggctt

SEQ ID NO: 2870 - DNA, 21 bp, synthetic construct
  source 1..21: mol_type = other DNA
  modified_base 1: mod_base = OTHER; note = uridine-3'-phosphate
  modified_base 2: mod_base = OTHER; note = uridine-3'-phosphate
  modified_base 3: mod_base = OTHER; note = cytidine-3'-phosphate
  modified_base 4: mod_base = OTHER; note = cytidine-3'-phosphate
  modified_base 5: mod_base = OTHER; note = uridine-3'-phosphate
  modified_base 6: mod_base = OTHER; note = uridine-3'-phosphate
  modified_base 7: mod_base = OTHER; note = guanosine-3'-phosphate
  modified_base 8: mod_base = OTHER; note = guanosine-3'-phosphate
  modified_base 9: mod_base = OTHER; note = uridine-3'-phosphate
  modified_base 10: mod_base = OTHER; note = adenosine-3'-phosphate
  modified_base 11: mod_base = OTHER; note = uridine-3'-phosphate
  modified_base 12: mod_base = OTHER; note = uridine-3'-phosphate
  modified_base 13: mod_base = OTHER; note = uridine-3'-phosphate
  modified_base 14: mod_base = OTHER; note = uridine-3'-phosphate
  modified_base 15: mod_base = OTHER; note = cytidine-3'-phosphate
  modified_base 16: mod_base = OTHER; note = uridine-3'-phosphate
  modified_base 17: mod_base = OTHER; note = uridine-3'-phosphate
  modified_base 18: mod_base = OTHER; note = uridine-3'-phosphate
  modified_base 19: mod_base = OTHER; note = cytidine-3'-phosphate
  misc_feature 1..19: note = RNA
  misc_feature 20..21: note = DNA
ttccttggtattttctttctt

SEQ ID NO: 2871 - DNA, 21 bp, synthetic construct
  source 1..21: mol_type = other DNA
  modified_base 1: mod_base = OTHER; note = uridine-3'-phosphate
  modified_base 2: mod_base = OTHER; note = cytidine-3'-phosphate
  modified_base 3: mod_base = OTHER; note = adenosine-3'-phosphate
  modified_base 4: mod_base = OTHER; note = guanosine-3'-phosphate
  modified_base 5: mod_base = OTHER; note = uridine-3'-phosphate
  modified_base 6: mod_base = OTHER; note = uridine-3'-phosphate
  modified_base 7: mod_base = OTHER; note = uridine-3'-phosphate
  modified_base 8: mod_base = OTHER; note = cytidine-3'-phosphate
  modified_base 9: mod_base = OTHER; note = cytidine-3'-phosphate
  modified_base 10: mod_base = OTHER; note = uridine-3'-phosphate
  modified_base 11: mod_base = OTHER; note = guanosine-3'-phosphate
  modified_base 12: mod_base = OTHER; note = uridine-3'-phosphate
  modified_base 13: mod_base = OTHER; note = uridine-3'-phosphate
  modified_base 14: mod_base = OTHER; note = cytidine-3'-phosphate
  modified_base 15: mod_base = OTHER; note = cytidine-3'-phosphate
  modified_base 16: mod_base = OTHER; note = uridine-3'-phosphate
  modified_base 17: mod_base = OTHER; note = uridine-3'-phosphate
  modified_base 18: mod_base = OTHER; note = guanosine-3'-phosphate
  modified_base 19: mod_base = OTHER; note = guanosine-3'-phosphate
  misc_feature 1..19: note = RNA
  misc_feature 20..21: note = DNA
tcagtttcctgttccttggtt

SEQ ID NO: 2872 - DNA, 21 bp, synthetic construct
  source 1..21: mol_type = other DNA
  modified_base 1: mod_base = OTHER; note = cytidine-3'-phosphate
  modified_base 2: mod_base = OTHER; note = adenosine-3'-phosphate
  modified_base 3: mod_base = OTHER; note = guanosine-3'-phosphate
  modified_base 4: mod_base = OTHER; note = guanosine-3'-phosphate
  modified_base 5: mod_base = OTHER; note = cytidine-3'-phosphate
  modified_base 6: mod_base = OTHER; note = uridine-3'-phosphate
  modified_base 7: mod_base = OTHER; note = uridine-3'-phosphate
  modified_base 8: mod_base = OTHER; note = uridine-3'-phosphate
  modified_base 9: mod_base = OTHER; note = adenosine-3'-phosphate
  modified_base 10: mod_base = OTHER; note = adenosine-3'-phosphate
  modified_base 11: mod_base = OTHER; note = uridine-3'-phosphate
  modified_base 12: mod_base = OTHER; note = guanosine-3'-phosphate
  modified_base 13: mod_base = OTHER; note = adenosine-3'-phosphate
  modified_base 14: mod_base = OTHER; note = uridine-3'-phosphate
  modified_base 15: mod_base = OTHER; note = cytidine-3'-phosphate
  modified_base 16: mod_base = OTHER; note = adenosine-3'-phosphate
  modified_base 17: mod_base = OTHER; note = guanosine-3'-phosphate
  modified_base 18: mod_base = OTHER; note = uridine-3'-phosphate
  modified_base 19: mod_base = OTHER; note = uridine-3'-phosphate
  misc_feature 1..19: note = RNA
  misc_feature 20..21: note = DNA
caggctttaatgatcagtttt

SEQ ID NO: 2873 - RNA, 21 nt, synthetic construct
  source 1..21: mol_type = other RNA
  modified_base 1: mod_base = OTHER; note = 2'-deoxy-2'-fluoroadenosine-3'-phosphorothioate
  modified_base 2: mod_base = OTHER; note = 2'-O-methyladenosine-3'-phosphorothioate
  modified_base 3: mod_base = OTHER; note = 2'-deoxy-2'-fluoroguanosine-3'-phosphate
  modified_base 4: mod_base = OTHER; note = 2'-O-methylcytidine-3'-phosphate
  modified_base 5: mod_base = OTHER; note = 2'-deoxy-2'-fluoroadenosine-3'-phosphate
  modified_base 6: mod_base = OTHER; note = 2'-O-methyladenosine-3'-phosphate
  modified_base 7: mod_base = OTHER; note = 2'-deoxy-2'-fluoroguanosine-3'-phosphate
  modified_base 8: mod_base = OTHER; note = 2'-O-methyladenosine-3'-phosphate
  modified_base 9: mod_base = OTHER; note = 2'-deoxy-2'-fluorouridine-3'-phosphate
  modified_base 10: mod_base = OTHER; note = 2'-deoxy-2'-fluoroadenosine-3'-phosphate
  modified_base 11: mod_base = OTHER; note = 2'-deoxy-2'-fluorouridine-3'-phosphate
  modified_base 12: mod_base = OTHER; note = 2'-O-methyluridine-3'-phosphate
  modified_base 13: mod_base = OTHER; note = 2'-deoxy-2'-fluorouridine-3'-phosphate
  modified_base 14: mod_base = OTHER; note = 2'-O-methyluridine-3'-phosphate
  modified_base 15: mod_base = OTHER; note = 2'-deoxy-2'-fluorouridine-3'-phosphate
  modified_base 16: mod_base = OTHER; note = 2'-O-methyladenosine-3'-phosphate
  modified_base 17: mod_base = OTHER; note = 2'-deoxy-2'-fluorouridine-3'-phosphate
  modified_base 18: mod_base = OTHER; note = 2'-O-methyladenosine-3'-phosphate
  modified_base 19: mod_base = OTHER; note = 2'-deoxy-2'-fluoroadenosine-3'-phosphate
  modified_base 20: mod_base = OTHER; note = 2'-O-methyluridine-3'-phosphate
  modified_base 21: mod_base = OTHER; note = 2'-deoxy-2'-fluoroadenosine-3'-phosphate ((2S,4R)-1-[29-[[2-(acetylamino)-2-deoxy-beta-D-galactopyra nosyl]oxy]-14,14-bis[[3-[[3-[[5-[[2-(acetylamino)-2-deoxy-b eta-D-galactopyranosyl]oxy]-1-oxopentyl]amino]propyl]amino] -3-oxopropoxy]methyl]-1,12,19,25-tetraoxo-16-oxa-13,20,24-t riazanonacos-1-yl]-4-hydroxy-2-pyrrolidinyl)methyl ester
aagcaagatatttttataata

SEQ ID NO: 2874 - RNA, 21 nt, synthetic construct
  source 1..21: mol_type = other RNA
  modified_base 1: mod_base = OTHER; note = 2'-O-methyladenosine-3'-phosphorothioate
  modified_base 2: mod_base = OTHER; note = 2'-O-methyladenosine-3'-phosphorothioate
  modified_base 3: mod_base = OTHER; note = 2'-deoxy-2'-fluoroguanosine-3'-phosphate
  modified_base 4: mod_base = OTHER; note = 2'-O-methylcytidine-3'-phosphate
  modified_base 5: mod_base = OTHER; note = 2'-deoxy-2'-fluoroadenosine-3'-phosphate
  modified_base 6: mod_base = OTHER; note = 2'-O-methyladenosine-3'-phosphate
  modified_base 7: mod_base = OTHER; note = 2'-deoxy-2'-fluoroguanosine-3'-phosphate
  modified_base 8: mod_base = OTHER; note = 2'-O-methyladenosine-3'-phosphate
  modified_base 9: mod_base = OTHER; note = 2'-deoxy-2'-fluorouridine-3'-phosphate
  modified_base 10: mod_base = OTHER; note = 2'-deoxy-2'-fluoroadenosine-3'-phosphate
  modified_base 11: mod_base = OTHER; note = 2'-deoxy-2'-fluorouridine-3'-phosphate
  modified_base 12: mod_base = OTHER; note = 2'-O-methyluridine-3'-phosphate
  modified_base 13: mod_base = OTHER; note = 2'-deoxy-2'-fluorouridine-3'-phosphate
  modified_base 14: mod_base = OTHER; note = 2'-O-methyluridine-3'-phosphate
  modified_base 15: mod_base = OTHER; note = 2'-O-methyluridine-3'-phosphate
  modified_base 16: mod_base = OTHER; note = 2'-deoxy-2'-fluoroadenosine-3'-phosphate
  modified_base 17: mod_base = OTHER; note = 2'-O-methyluridine-3'-phosphate
  modified_base 18: mod_base = OTHER; note = 2'-deoxy-2'-fluoroadenosine-3'-phosphate
  modified_base 19: mod_base = OTHER; note = 2'-O-methyladenosine-3'-phosphate
  modified_base 20: mod_base = OTHER; note = 2'-O-methyluridine-3'-phosphate
  modified_base 21: mod_base = OTHER; note = 2'-O-methyladenosine-3'-phosphate ((2S,4R)-1-[29-[[2-(acetylamino)-2-deoxy-beta-D-galactopyra nosyl]oxy]-14,14-bis[[3-[[3-[[5-[[2-(acetylamino)-2-deoxy-b eta-D-galactopyranosyl]oxy]-1-oxopentyl]amino]propyl]amino] -3-oxopropoxy]methyl]-1,12,19,25-tetraoxo-16-oxa-13,20,24-t riazanonacos-1-yl]-4-hydroxy-2-pyrrolidinyl)methyl ester
aagcaagatatttttataata

SEQ ID NO: 2875 - RNA, 21 nt, synthetic construct
  source 1..21: mol_type = other RNA
  modified_base 1: mod_base = OTHER; note = 2'-O-methyladenosine-3'-phosphorothioate
  modified_base 2: mod_base = OTHER; note = 2'-O-methyladenosine-3'-phosphorothioate
  modified_base 3: mod_base = OTHER; note = 2'-deoxy-2'-fluoroguanosine-3'-phosphate
  modified_base 4: mod_base = OTHER; note = 2'-O-methylcytidine-3'-phosphate
  modified_base 5: mod_base = OTHER; note = 2'-deoxy-2'-fluoroadenosine-3'-phosphate
  modified_base 6: mod_base = OTHER; note = 2'-O-methyladenosine-3'-phosphate
  modified_base 7: mod_base = OTHER; note = 2'-deoxy-2'-fluoroguanosine-3'-phosphate
  modified_base 8: mod_base = OTHER; note = 2'-O-methyladenosine-3'-phosphate
  modified_base 9: mod_base = OTHER; note = 2'-deoxy-2'-fluorouridine-3'-phosphate
  modified_base 10: mod_base = OTHER; note = 2'-deoxy-2'-fluoroadenosine-3'-phosphate
  modified_base 11: mod_base = OTHER; note = 2'-deoxy-2'-fluorouridine-3'-phosphate
  modified_base 12: mod_base = OTHER; note = 2'-O-methyluridine-3'-phosphate
  modified_base 13: mod_base = OTHER; note = 2'-deoxy-2'-fluorouridine-3'-phosphate
  modified_base 14: mod_base = OTHER; note = 2'-O-methyluridine-3'-phosphate
  modified_base 15: mod_base = OTHER; note = 2'-O-methyluridine-3'-phosphate
  modified_base 16: mod_base = OTHER; note = 2'-deoxy-2'-fluoroadenosine-3'-phosphate
  modified_base 17: mod_base = OTHER; note = 2'-O-methyluridine-3'-phosphate
  modified_base 18: mod_base = OTHER; note = 2'-deoxy-2'-fluoroadenosine-3'-phosphate
  modified_base 19: mod_base = OTHER; note = 2'-O-methyladenosine-3'-phosphate
  modified_base 20: mod_base = OTHER; note = 2'-O-methyluridine-3'-phosphate
  modified_base 21: mod_base = OTHER; note = 2'-O-methyladenosine-3'-phosphate ((2S,4R)-1-[29-[[2-(acetylamino)-2-deoxy-beta-D-galactopyra nosyl]oxy]-14,14-bis[[3-[[3-[[5-[[2-(acetylamino)-2-deoxy-b eta-D-galactopyranosyl]oxy]-1-oxopentyl]amino]propyl]amino] -3-oxopropoxy]methyl]-1,12,19,25-tetraoxo-16-oxa-13,20,24-t riazanonacos-1-yl]-4-hydroxy-2-pyrrolidinyl)methyl ester
aagcaagatatttttataata

SEQ ID NO: 2876 - RNA, 21 nt, synthetic construct
  source 1..21: mol_type = other RNA
  modified_base 1: mod_base = OTHER; note = 2'-O-methyladenosine-3'-phosphorothioate
  modified_base 2: mod_base = OTHER; note = 2'-O-methyladenosine-3'-phosphorothioate
  modified_base 3: mod_base = OTHER; note = 2'-deoxy-2'-fluoroguanosine-3'-phosphate
  modified_base 4: mod_base = OTHER; note = 2'-O-methylcytidine-3'-phosphate
  modified_base 5: mod_base = OTHER; note = 2'-deoxy-2'-fluoroadenosine-3'-phosphate
  modified_base 6: mod_base = OTHER; note = 2'-O-methyladenosine-3'-phosphate
  modified_base 7: mod_base = OTHER; note = 2'-deoxy-2'-fluoroguanosine-3'-phosphate
  modified_base 8: mod_base = OTHER; note = 2'-O-methyladenosine-3'-phosphate
  modified_base 9: mod_base = OTHER; note = 2'-deoxy-2'-fluorouridine-3'-phosphate
  modified_base 10: mod_base = OTHER; note = 2'-deoxy-2'-fluoroadenosine-3'-phosphate
  modified_base 11: mod_base = OTHER; note = 2'-deoxy-2'-fluorouridine-3'-phosphate
  modified_base 12: mod_base = OTHER; note = 2'-O-methyluridine-3'-phosphate
  modified_base 13: mod_base = OTHER; note = 2'-deoxy-2'-fluorouridine-3'-phosphate
  modified_base 14: mod_base = OTHER; note = 2'-O-methyluridine-3'-phosphate
  modified_base 15: mod_base = OTHER; note = 2'-O-methyluridine-3'-phosphate
  modified_base 16: mod_base = OTHER; note = 2'-deoxy-2'-fluoroadenosine-3'-phosphate
  modified_base 17: mod_base = OTHER; note = 2'-O-methyluridine-3'-phosphate
  modified_base 18: mod_base = OTHER; note = 2'-deoxy-2'-fluoroadenosine-3'-phosphate
  modified_base 19: mod_base = OTHER; note = 2'-O-methyladenosine-3'-phosphate
  modified_base 20: mod_base = OTHER; note = 2'-O-methyluridine-3'-phosphate
  modified_base 21: mod_base = OTHER; note = 2'-O-methyladenosine-3'-phosphate ((2S,4R)-1-[29-[[2-(acetylamino)-2-deoxy-beta-D-galactopyra nosyl]oxy]-14,14-bis[[3-[[3-[[5-[[2-(acetylamino)-2-deoxy-b eta-D-galactopyranosyl]oxy]-1-oxopentyl]amino]propyl]amino] -3-oxopropoxy]methyl]-1,12,19,25-tetraoxo-16-oxa-13,20,24-t riazanonacos-1-yl]-4-hydroxy-2-pyrrolidinyl)methyl ester
aagcaagatatttttataata

SEQ ID NO: 2877 - RNA, 21 nt, synthetic construct
  source 1..21: mol_type = other RNA
  modified_base 1: mod_base = OTHER; note = 2'-O-methyladenosine-3'-phosphorothioate
  modified_base 2: mod_base = OTHER; note = 2'-O-methyladenosine-3'-phosphorothioate
  modified_base 3: mod_base = OTHER; note = 2'-deoxy-2'-fluoroguanosine-3'-phosphate
  modified_base 4: mod_base = OTHER; note = 2'-O-methylcytidine-3'-phosphate
  modified_base 5: mod_base = OTHER; note = 2'-deoxy-2'-fluoroadenosine-3'-phosphate
  modified_base 6: mod_base = OTHER; note = 2'-O-methyladenosine-3'-phosphate
  modified_base 7: mod_base = OTHER; note = 2'-deoxy-2'-fluoroguanosine-3'-phosphate
  modified_base 8: mod_base = OTHER; note = 2'-O-methyladenosine-3'-phosphate
  modified_base 9: mod_base = OTHER; note = 2'-deoxy-2'-fluorouridine-3'-phosphate
  modified_base 10: mod_base = OTHER; note = 2'-deoxy-2'-fluoroadenosine-3'-phosphate
  modified_base 11: mod_base = OTHER; note = 2'-deoxy-2'-fluorouridine-3'-phosphate
  modified_base 12: mod_base = OTHER; note = 2'-O-methyluridine-3'-phosphate
  modified_base 13: mod_base = OTHER; note = 2'-deoxy-2'-fluorouridine-3'-phosphate
  modified_base 14: mod_base = OTHER; note = 2'-O-methyluridine-3'-phosphate
  modified_base 15: mod_base = OTHER; note = 2'-O-methyluridine-3'-phosphate
  modified_base 16: mod_base = OTHER; note = 2'-deoxy-2'-fluoroadenosine-3'-phosphate
  modified_base 17: mod_base = OTHER; note = 2'-O-methyluridine-3'-phosphate
  modified_base 18: mod_base = OTHER; note = 2'-O-methyladenosine-3'-phosphate
  modified_base 19: mod_base = OTHER; note = 2'-deoxy-2'-fluoroadenosine-3'-phosphate
  modified_base 20: mod_base = OTHER; note = 2'-O-methyluridine-3'-phosphate
  modified_base 21: mod_base = OTHER; note = 2'-O-methyladenosine-3'-phosphate ((2S,4R)-1-[29-[[2-(acetylamino)-2-deoxy-beta-D-galactopyra nosyl]oxy]-14,14-bis[[3-[[3-[[5-[[2-(acetylamino)-2-deoxy-b eta-D-galactopyranosyl]oxy]-1-oxopentyl]amino]propyl]amino] -3-oxopropoxy]methyl]-1,12,19,25-tetraoxo-16-oxa-13,20,24-t riazanonacos-1-yl]-4-hydroxy-2-pyrrolidinyl)methyl ester
aagcaagatatttttataata

SEQ ID NO: 2878 - RNA, 21 nt, synthetic construct
  source 1..21: mol_type = other RNA
  modified_base 1: mod_base = OTHER; note = 2'-O-methyladenosine-3'-phosphorothioate
  modified_base 2: mod_base = OTHER; note = 2'-O-methyladenosine-3'-phosphorothioate
  modified_base 3: mod_base = OTHER; note = 2'-deoxy-2'-fluoroguanosine-3'-phosphate
  modified_base 4: mod_base = OTHER; note = 2'-O-methylcytidine-3'-phosphate
  modified_base 5: mod_base = OTHER; note = 2'-deoxy-2'-fluoroadenosine-3'-phosphate
  modified_base 6: mod_base = OTHER; note = 2'-O-methyladenosine-3'-phosphate
  modified_base 7: mod_base = OTHER; note = 2'-deoxy-2'-fluoroguanosine-3'-phosphate
  modified_base 8: mod_base = OTHER; note = 2'-O-methyladenosine-3'-phosphate
  modified_base 9: mod_base = OTHER; note = 2'-deoxy-2'-fluorouridine-3'-phosphate
  modified_base 10: mod_base = OTHER; note = 2'-deoxy-2'-fluoroadenosine-3'-phosphate
  modified_base 11: mod_base = OTHER; note = 2'-deoxy-2'-fluorouridine-3'-phosphate
  modified_base 12: mod_base = OTHER; note = 2'-O-methyluridine-3'-phosphate
  modified_base 13: mod_base = OTHER; note = 2'-deoxy-2'-fluorouridine-3'-phosphate
  modified_base 14: mod_base = OTHER; note = 2'-O-methyluridine-3'-phosphate
  modified_base 15: mod_base = OTHER; note = 2'-O-methyluridine-3'-phosphate
  modified_base 16: mod_base = OTHER; note = 2'-deoxy-2'-fluoroadenosine-3'-phosphate
  modified_base 17: mod_base = OTHER; note = 2'-O-methyluridine-3'-phosphate
  modified_base 18: mod_base = OTHER; note = 2'-O-methyladenosine-3'-phosphate
  modified_base 19: mod_base = OTHER; note = 2'-deoxy-2'-fluoroadenosine-3'-phosphate
  modified_base 20: mod_base = OTHER; note = 2'-O-methyluridine-3'-phosphate
  modified_base 21: mod_base = OTHER; note = 2'-O-methyladenosine-3'-phosphate ((2S,4R)-1-[29-[[2-(acetylamino)-2-deoxy-beta-D-galactopyra nosyl]oxy]-14,14-bis[[3-[[3-[[5-[[2-(acetylamino)-2-deoxy-b eta-D-galactopyranosyl]oxy]-1-oxopentyl]amino]propyl]amino] -3-oxopropoxy]methyl]-1,12,19,25-tetraoxo-16-oxa-13,20,24-t riazanonacos-1-yl]-4-hydroxy-2-pyrrolidinyl)methyl ester
aagcaagatatttttataata

SEQ ID NO: 2879 - RNA, 21 nt, synthetic construct
  source 1..21: mol_type = other RNA
  modified_base 1: mod_base = OTHER; note = 2'-O-methyladenosine-3'-phosphorothioate
  modified_base 2: mod_base = OTHER; note = 2'-O-methyladenosine-3'-phosphorothioate
  modified_base 3: mod_base = OTHER; note = 2'-deoxy-2'-fluoroguanosine-3'-phosphate
  modified_base 4: mod_base = OTHER; note = 2'-O-methylcytidine-3'-phosphate
  modified_base 5: mod_base = OTHER; note = 2'-deoxy-2'-fluoroadenosine-3'-phosphate
  modified_base 6: mod_base = OTHER; note = 2'-O-methyladenosine-3'-phosphate
  modified_base 7: mod_base = OTHER; note = 2'-deoxy-2'-fluoroguanosine-3'-phosphate
  modified_base 8: mod_base = OTHER; note = 2'-O-methyladenosine-3'-phosphate
  modified_base 9: mod_base = OTHER; note = 2'-deoxy-2'-fluorouridine-3'-phosphate
  modified_base 10: mod_base = OTHER; note = 2'-deoxy-2'-fluoroadenosine-3'-phosphate
  modified_base 11: mod_base = OTHER; note = 2'-deoxy-2'-fluorouridine-3'-phosphate
  modified_base 12: mod_base = OTHER; note = 2'-O-methyluridine-3'-phosphate
  modified_base 13: mod_base = OTHER; note = 2'-deoxy-2'-fluorouridine-3'-phosphate
  modified_base 14: mod_base = OTHER; note = 2'-O-methyluridine-3'-phosphate
  modified_base 15: mod_base = OTHER; note = 2'-O-methyluridine-3'-phosphate
  modified_base 16: mod_base = OTHER; note = 2'-deoxy-2'-fluoroadenosine-3'-phosphate
  modified_base 17: mod_base = OTHER; note = 2'-O-methyluridine-3'-phosphate
  modified_base 18: mod_base = OTHER; note = 2'-O-methyladenosine-3'-phosphate
  modified_base 19: mod_base = OTHER; note = 2'-deoxy-2'-fluoroadenosine-3'-phosphate
  modified_base 20: mod_base = OTHER; note = 2'-O-methyluridine-3'-phosphate
  modified_base 21: mod_base = OTHER; note = 2'-O-methyladenosine-3'-phosphate ((2S,4R)-1-[29-[[2-(acetylamino)-2-deoxy-beta-D-galactopyra nosyl]oxy]-14,14-bis[[3-[[3-[[5-[[2-(acetylamino)-2-deoxy-b eta-D-galactopyranosyl]oxy]-1-oxopentyl]amino]propyl]amino] -3-oxopropoxy]methyl]-1,12,19,25-tetraoxo-16-oxa-13,20,24-t riazanonacos-1-yl]-4-hydroxy-2-pyrrolidinyl)methyl ester
aagcaagatatttttataata

SEQ ID NO: 2880 - RNA, 21 nt, synthetic construct
  source 1..21: mol_type = other RNA
  modified_base 1: mod_base = OTHER; note = 2'-O-methyladenosine-3'-phosphorothioate
  modified_base 2: mod_base = OTHER; note = 2'-O-methyladenosine-3'-phosphorothioate
  modified_base 3: mod_base = OTHER; note = 2'-O-methylguanosine-3'-phosphate
  modified_base 4: mod_base = OTHER; note = 2'-O-methylcytidine-3'-phosphate
  modified_base 5: mod_base = OTHER; note = 2'-O-methyladenosine-3'-phosphate
  modified_base 6: mod_base = OTHER; note = 2'-O-methyladenosine-3'-phosphate
  modified_base 7: mod_base = OTHER; note = 2'-O-methylguanosine-3'-phosphate
  modified_base 8: mod_base = OTHER; note = 2'-O-methyladenosine-3'-phosphate
  modified_base 9: mod_base = OTHER; note = 2'-O-methyluridine-3'-phosphate
  modified_base 10: mod_base = OTHER; note = 2'-O-methyladenosine-3'-phosphate
  modified_base 11: mod_base = OTHER; note = 2'-deoxy-2'-fluorouridine-3'-phosphate
  modified_base 12: mod_base = OTHER; note = 2'-O-methyluridine-3'-phosphate
  modified_base 13: mod_base = OTHER; note = 2'-O-methyluridine-3'-phosphate
  modified_base 14: mod_base = OTHER; note = 2'-O-methyluridine-3'-phosphate
  modified_base 15: mod_base = OTHER; note = 2'-O-methyluridine-3'-phosphate
  modified_base 16: mod_base = OTHER; note = 2'-O-methyladenosine-3'-phosphate
  modified_base 17: mod_base = OTHER; note = Thymidine-glycol nucleic acid (GNA), S-Isomer
  modified_base 18: mod_base = OTHER; note = 2'-O-methyladenosine-3'-phosphate
  modified_base 19: mod_base = OTHER; note = 2'-O-methyladenosine-3'-phosphate
  modified_base 20: mod_base = OTHER; note = 2'-O-methyluridine-3'-phosphate
  modified_base 21: mod_base = OTHER; note = 2'-O-methyladenosine-3'-phosphate ((2S,4R)-1-[29-[[2-(acetylamino)-2-deoxy-beta-D-galactopyra nosyl]oxy]-14,14-bis[[3-[[3-[[5-[[2-(acetylamino)-2-deoxy-b eta-D-galactopyranosyl]oxy]-1-oxopentyl]amino]propyl]amino] -3-oxopropoxy]methyl]-1,12,19,25-tetraoxo-16-oxa-13,20,24-t riazanonacos-1-yl]-4-hydroxy-2-pyrrolidinyl)methyl ester
aagcaagatatttttataata

SEQ ID NO: 2881 - RNA, 21 nt, synthetic construct
  source 1..21: mol_type = other RNA
  modified_base 1: mod_base = OTHER; note = 2'-O-methyladenosine-3'-phosphorothioate
  modified_base 2: mod_base = OTHER; note = 2'-O-methyladenosine-3'-phosphorothioate
  modified_base 3: mod_base = OTHER; note = 2'-O-methylguanosine-3'-phosphate
  modified_base 4: mod_base = OTHER; note = 2'-O-methylcytidine-3'-phosphate
  modified_base 5: mod_base = OTHER; note = 2'-O-methyladenosine-3'-phosphate
  modified_base 6: mod_base = OTHER; note = 2'-O-methyladenosine-3'-phosphate
  modified_base 7: mod_base = OTHER; note = 2'-O-methylguanosine-3'-phosphate
  modified_base 8: mod_base = OTHER; note = 2'-O-methyladenosine-3'-phosphate
  modified_base 9: mod_base = OTHER; note = 2'-O-methyluridine-3'-phosphate
  modified_base 10: mod_base = OTHER; note = 2'-O-methyladenosine-3'-phosphate
  modified_base 11: mod_base = OTHER; note = 2'-deoxy-2'-fluorouridine-3'-phosphate
  modified_base 12: mod_base = OTHER; note = 2'-O-methyluridine-3'-phosphate
  modified_base 13: mod_base = OTHER; note = 2'-O-methyluridine-3'-phosphate
  modified_base 14: mod_base = OTHER; note = 2'-O-methyluridine-3'-phosphate
  modified_base 15: mod_base = OTHER; note = 2'-O-methyluridine-3'-phosphate
  modified_base 16: mod_base = OTHER; note = 2'-O-methyladenosine-3'-phosphate
  modified_base 17: mod_base = OTHER; note = Thymidine-glycol nucleic acid (GNA), S-Isomer
  modified_base 18: mod_base = OTHER; note = 2'-O-methyladenosine-3'-phosphate
  modified_base 19: mod_base = OTHER; note = 2'-O-methyladenosine-3'-phosphate
  modified_base 20: mod_base = OTHER; note = 2'-O-methyluridine-3'-phosphate
  modified_base 21: mod_base = OTHER; note = 2'-O-methyladenosine-3'-phosphate ((2S,4R)-1-[29-[[2-(acetylamino)-2-deoxy-beta-D-galactopyra nosyl]oxy]-14,14-bis[[3-[[3-[[5-[[2-(acetylamino)-2-deoxy-b eta-D-galactopyranosyl]oxy]-1-oxopentyl]amino]propyl]amino] -3-oxopropoxy]methyl]-1,12,19,25-tetraoxo-16-oxa-13,20,24-t riazanonacos-1-yl]-4-hydroxy-2-pyrrolidinyl)methyl ester
aagcaagatatttttataata

SEQ ID NO: 2882 - RNA, 21 nt, synthetic construct
  source 1..21: mol_type = other RNA
  modified_base 1: mod_base = OTHER; note = 2'-O-methyladenosine-3'-phosphorothioate
  modified_base 2: mod_base = OTHER; note = 2'-O-methyladenosine-3'-phosphorothioate
  modified_base 3: mod_base = OTHER; note = 2'-O-methylguanosine-3'-phosphate
  modified_base 4: mod_base = OTHER; note = 2'-O-methylcytidine-3'-phosphate
  modified_base 5: mod_base = OTHER; note = 2'-O-methyladenosine-3'-phosphate
  modified_base 6: mod_base = OTHER; note = 2'-O-methyladenosine-3'-phosphate
  modified_base 7: mod_base = OTHER; note = 2'-O-methylguanosine-3'-phosphate
  modified_base 8: mod_base = OTHER; note = 2'-O-methyladenosine-3'-phosphate
  modified_base 9: mod_base = OTHER; note = 2'-O-methyluridine-3'-phosphate
  modified_base 10: mod_base = OTHER; note = 2'-O-methyladenosine-3'-phosphate
  modified_base 11: mod_base = OTHER; note = 2'-deoxy-2'-fluorouridine-3'-phosphate
  modified_base 12: mod_base = OTHER; note = 2'-O-methyluridine-3'-phosphate
  modified_base 13: mod_base = OTHER; note = 2'-O-methyluridine-3'-phosphate
  modified_base 14: mod_base = OTHER; note = 2'-O-methyluridine-3'-phosphate
  modified_base 15: mod_base = OTHER; note = 2'-O-methyluridine-3'-phosphate
  modified_base 16: mod_base = OTHER; note = 2'-O-methyladenosine-3'-phosphate
  modified_base 17: mod_base = OTHER; note = Thymidine-glycol nucleic acid (GNA), S-Isomer
  modified_base 18: mod_base = OTHER; note = 2'-O-methyladenosine-3'-phosphate
  modified_base 19: mod_base = OTHER; note = 2'-O-methyladenosine-3'-phosphate
  modified_base 20: mod_base = OTHER; note = 2'-O-methyluridine-3'-phosphate
  modified_base 21: mod_base = OTHER; note = 2'-O-methyladenosine-3'-phosphate ((2S,4R)-1-[29-[[2-(acetylamino)-2-deoxy-beta-D-galactopyra nosyl]oxy]-14,14-bis[[3-[[3-[[5-[[2-(acetylamino)-2-deoxy-b eta-D-galactopyranosyl]oxy]-1-oxopentyl]amino]propyl]amino] -3-oxopropoxy]methyl]-1,12,19,25-tetraoxo-16-oxa-13,20,24-t riazanonacos-1-yl]-4-hydroxy-2-pyrrolidinyl)methyl ester
aagcaagatatttttataata

SEQ ID NO: 2883 - RNA, 21 nt, synthetic construct
  source 1..21: mol_type = other RNA
  modified_base 1: mod_base = OTHER; note = 2'-O-methyladenosine-3'-phosphorothioate
  modified_base 2: mod_base = OTHER; note = 2'-O-methyladenosine-3'-phosphorothioate
  modified_base 3: mod_base = OTHER; note = 2'-O-methylguanosine-3'-phosphate
  modified_base 4: mod_base = OTHER; note = 2'-O-methylcytidine-3'-phosphate
  modified_base 5: mod_base = OTHER; note = 2'-O-methyladenosine-3'-phosphate
  modified_base 6: mod_base = OTHER; note = 2'-O-methyladenosine-3'-phosphate
  modified_base 7: mod_base = OTHER; note = 2'-O-methylguanosine-3'-phosphate
  modified_base 8: mod_base = OTHER; note = 2'-O-methyladenosine-3'-phosphate
  modified_base 9: mod_base = OTHER; note = 2'-deoxy-2'-fluorouridine-3'-phosphate
  modified_base 10: mod_base = OTHER; note = 2'-O-methyladenosine-3'-phosphate
  modified_base 11: mod_base = OTHER; note = 2'-deoxy-2'-fluorouridine-3'-phosphate
  modified_base 12: mod_base = OTHER; note = 2'-O-methyluridine-3'-phosphate
  modified_base 13: mod_base = OTHER; note = 2'-O-methyluridine-3'-phosphate
  modified_base 14: mod_base = OTHER; note = 2'-O-methyluridine-3'-phosphate
  modified_base 15: mod_base = OTHER; note = 2'-O-methyluridine-3'-phosphate
  modified_base 16: mod_base = OTHER; note = 2'-O-methyladenosine-3'-phosphate
  modified_base 17: mod_base = OTHER; note = 2'-O-methyluridine-3'-phosphate
  modified_base 18: mod_base = OTHER; note = 2'-O-methyladenosine-3'-phosphate
  modified_base 19: mod_base = OTHER; note = 2'-O-methyladenosine-3'-phosphate
  modified_base 20: mod_base = OTHER; note = 2'-O-methyluridine-3'-phosphate
  modified_base 21: mod_base = OTHER; note = 2'-O-methyladenosine-3'-phosphate ((2S,4R)-1-[29-[[2-(acetylamino)-2-deoxy-beta-D-galactopyra nosyl]oxy]-14,14-bis[[3-[[3-[[5-[[2-(acetylamino)-2-deoxy-b eta-D-galactopyranosyl]oxy]-1-oxopentyl]amino]propyl]amino] -3-oxopropoxy]methyl]-1,12,19,25-tetraoxo-16-oxa-13,20,24-t riazanonacos-1-yl]-4-hydroxy-2-pyrrolidinyl)methyl ester
aagcaagatatttttataata

SEQ ID NO: 2884 - RNA, 21 nt, synthetic construct
  source 1..21: mol_type = other RNA
  modified_base 1: mod_base = OTHER; note = 2'-O-methyladenosine-3'-phosphorothioate
  modified_base 2: mod_base = OTHER; note = 2'-O-methyladenosine-3'-phosphorothioate
  modified_base 3: mod_base = OTHER; note = 2'-O-methylguanosine-3'-phosphate
  modified_base 4: mod_base = OTHER; note = 2'-O-methylcytidine-3'-phosphate
  modified_base 5: mod_base = OTHER; note = 2'-O-methyladenosine-3'-phosphate
  modified_base 6: mod_base = OTHER; note = 2'-O-methyladenosine-3'-phosphate
  modified_base 7: mod_base = OTHER; note = 2'-O-methylguanosine-3'-phosphate
  modified_base 8: mod_base = OTHER; note = 2'-O-methyladenosine-3'-phosphate
  modified_base 9: mod_base = OTHER; note = 2'-deoxy-2'-fluorouridine-3'-phosphate
  modified_base 10: mod_base = OTHER; note = 2'-O-methyladenosine-3'-phosphate
  modified_base 11: mod_base = OTHER; note = 2'-deoxy-2'-fluorouridine-3'-phosphate
  modified_base 12: mod_base = OTHER; note = 2'-O-methyluridine-3'-phosphate
  modified_base 13: mod_base = OTHER; note = 2'-O-methyluridine-3'-phosphate
  modified_base 14: mod_base = OTHER; note = 2'-O-methyluridine-3'-phosphate
  modified_base 15: mod_base = OTHER; note = 2'-O-methyluridine-3'-phosphate
  modified_base 16: mod_base = OTHER; note = 2'-O-methyladenosine-3'-phosphate
  modified_base 17: mod_base = OTHER; note = 2'-O-methyluridine-3'-phosphate
  modified_base 18: mod_base = OTHER; note = 2'-O-methyladenosine-3'-phosphate
  modified_base 19: mod_base = OTHER; note = 2'-O-methyladenosine-3'-phosphate
  modified_base 20: mod_base = OTHER; note = 2'-O-methyluridine-3'-phosphate
  modified_base 21: mod_base = OTHER; note = 2'-O-methyladenosine-3'-phosphate ((2S,4R)-1-[29-[[2-(acetylamino)-2-deoxy-beta-D-galactopyra nosyl]oxy]-14,14-bis[[3-[[3-[[5-[[2-(acetylamino)-2-deoxy-b eta-D-galactopyranosyl]oxy]-1-oxopentyl]amino]propyl]amino] -3-oxopropoxy]methyl]-1,12,19,25-tetraoxo-16-oxa-13,20,24-t riazanonacos-1-yl]-4-hydroxy-2-pyrrolidinyl)methyl ester
aagcaagatatttttataata

SEQ ID NO: 2885 - RNA, 21 nt, synthetic construct
  source 1..21: mol_type = other RNA
  modified_base 1: mod_base = OTHER; note = 2'-O-methyladenosine-3'-phosphorothioate
  modified_base 2: mod_base = OTHER; note = 2'-O-methyladenosine-3'-phosphorothioate
  modified_base 3: mod_base = OTHER; note = 2'-O-methylguanosine-3'-phosphate
  modified_base 4: mod_base = OTHER; note = 2'-O-methylcytidine-3'-phosphate
  modified_base 5: mod_base = OTHER; note = 2'-O-methyladenosine-3'-phosphate
  modified_base 6: mod_base = OTHER; note = 2'-O-methyladenosine-3'-phosphate
  modified_base 7: mod_base = OTHER; note = 2'-O-methylguanosine-3'-phosphate
  modified_base 8: mod_base = OTHER; note = 2'-O-methyladenosine-3'-phosphate
  modified_base 9: mod_base = OTHER; note = 2'-deoxy-2'-fluorouridine-3'-phosphate
  modified_base 10: mod_base = OTHER; note = 2'-O-methyladenosine-3'-phosphate
  modified_base 11: mod_base = OTHER; note = 2'-deoxy-2'-fluorouridine-3'-phosphate
  modified_base 12: mod_base = OTHER; note = 2'-O-methyluridine-3'-phosphate
  modified_base 13: mod_base = OTHER; note = 2'-O-methyluridine-3'-phosphate
  modified_base 14: mod_base = OTHER; note = 2'-O-methyluridine-3'-phosphate
  modified_base 15: mod_base = OTHER; note = 2'-O-methyluridine-3'-phosphate
  modified_base 16: mod_base = OTHER; note = 2'-O-methyladenosine-3'-phosphate
  modified_base 17: mod_base = OTHER; note = 2'-O-methyluridine-3'-phosphate
  modified_base 18: mod_base = OTHER; note = 2'-O-methyladenosine-3'-phosphate
  modified_base 19: mod_base = OTHER; note = 2'-O-methyladenosine-3'-phosphate
  modified_base 20: mod_base = OTHER; note = 2'-O-methyluridine-3'-phosphate
  modified_base 21: mod_base = OTHER; note = 2'-O-methyladenosine-3'-phosphate ((2S,4R)-1-[29-[[2-(acetylamino)-2-deoxy-beta-D-galactopyra nosyl]oxy]-14,14-bis[[3-[[3-[[5-[[2-(acetylamino)-2-deoxy-b eta-D-galactopyranosyl]oxy]-1-oxopentyl]amino]propyl]amino] -3-oxopropoxy]methyl]-1,12,19,25-tetraoxo-16-oxa-13,20,24-t riazanonacos-1-yl]-4-hydroxy-2-pyrrolidinyl)methyl ester
aagcaagatatttttataata

SEQ ID NO: 2886 - RNA, 23 nt, synthetic construct
  source 1..23: mol_type = other RNA
  modified_base 1: mod_base = OTHER; note = 2'-O-methyluridine-3'-phosphorothioate
  modified_base 2: mod_base = OTHER; note = 2'-deoxy-2'-fluoroadenosine-3'-phosphorothioate
  modified_base 3: mod_base = OTHER; note = 2'-O-methyluridine-3'-phosphate
  modified_base 4: mod_base = OTHER; note = 2'-deoxy-2'-fluorouridine-3'-phosphate
  modified_base 5: mod_base = OTHER; note = 2'-O-methyladenosine-3'-phosphate
  modified_base 6: mod_base = OTHER; note = 2'-deoxy-2'-fluorouridine-3'-phosphate
  modified_base 7: mod_base = OTHER; note = 2'-O-methyladenosine-3'-phosphate
  modified_base 8: mod_base = OTHER; note = 2'-deoxy-2'-fluoroadenosine-3'-phosphate
  modified_base 9: mod_base = OTHER; note = 2'-O-methyladenosine-3'-phosphate
  modified_base 10: mod_base = OTHER; note = 2'-deoxy-2'-fluoroadenosine-3'-phosphate
  modified_base 11: mod_base = OTHER; note = 2'-O-methyladenosine-3'-phosphate
  modified_base 12: mod_base = OTHER; note = 2'-O-methyluridine-3'-phosphate
  modified_base 13: mod_base = OTHER; note = 2'-O-methyladenosine-3'-phosphate
  modified_base 14: mod_base = OTHER; note = 2'-deoxy-2'-fluorouridine-3'-phosphate
  modified_base 15: mod_base = OTHER; note = 2'-O-methylcytidine-3'-phosphate
  modified_base 16: mod_base = OTHER; note = 2'-deoxy-2'-fluorouridine-3'-phosphate
  modified_base 17: mod_base = OTHER; note = 2'-O-methyluridine-3'-phosphate
  modified_base 18: mod_base = OTHER; note = 2'-deoxy-2'-fluoroguanosine-3'-phosphate
  modified_base 19: mod_base = OTHER; note = 2'-O-methylcytidine-3'-phosphate
  modified_base 20: mod_base = OTHER; note = 2'-deoxy-2'-fluorouridine-3'-phosphate
  modified_base 21: mod_base = OTHER; note = 2'-O-methyluridine-3'-phosphorothioate
  modified_base 22: mod_base = OTHER; note = 2'-O-methyluridine-3'-phosphorothioate
  modified_base 23: mod_base = OTHER; note = 2'-O-methyluridine
tattataaaaatatcttgctttt

SEQ ID NO: 2887 - DNA, 25 bp, synthetic construct
  source 1..25: mol_type = other DNA
  modified_base 1: mod_base = OTHER; note = 2'-O-methyluridine-3'-phosphorothioate
  modified_base 2: mod_base = OTHER; note = 2'-deoxy-2'-fluoroadenosine-3'-phosphorothioate
  modified_base 3: mod_base = OTHER; note = 2'-O-methyluridine-3'-phosphate
  modified_base 4: mod_base = OTHER; note = 2'-O-methyluridine-3'-phosphate
  modified_base 5: mod_base = OTHER; note = 2'-O-methyladenosine-3'-phosphate
  modified_base 6: mod_base = OTHER; note = 2'-deoxy-2'-fluorouridine-3'-phosphate
  modified_base 7: mod_base = OTHER; note = 2'-O-methyladenosine-3'-phosphate
  modified_base 8: mod_base = OTHER; note = 2'-deoxy-2'-fluoroadenosine-3'-phosphate
  modified_base 9: mod_base = OTHER; note = 2'-O-methyladenosine-3'-phosphate
  modified_base 10: mod_base = OTHER; note = 2'-deoxy-2'-fluoroadenosine-3'-phosphate
  modified_base 11: mod_base = OTHER; note = 2'-O-methyladenosine-3'-phosphate
  modified_base 12: mod_base = OTHER; note = 2'-O-methyluridine-3'-phosphate
  modified_base 13: mod_base = OTHER; note = 2'-O-methyladenosine-3'-phosphate
  modified_base 14: mod_base = OTHER; note = 2'-deoxy-2'-fluorouridine-3'-phosphate
  modified_base 15: mod_base = OTHER; note = 2'-O-methylcytidine-3'-phosphate
  modified_base 16: mod_base = OTHER; note = 2'-deoxy-2'-fluorouridine-3'-phosphate
  modified_base 17: mod_base = OTHER; note = 2'-O-methyluridine-3'-phosphate
  modified_base 18: mod_base = OTHER; note = 2'-deoxy-2'-fluoroguanosine-3'-phosphate
  modified_base 19: mod_base = OTHER; note = 2'-O-methylcytidine-3'-phosphate
  modified_base 20: mod_base = OTHER; note = 2'-O-methyluridine-3'-phosphate
  modified_base 21: mod_base = OTHER; note = 2'-O-methyluridine-3'-phosphorothioate
  modified_base 22: mod_base = OTHER; note = 2'-O-methyluridine-3'-phosphorothioate
  modified_base 23: mod_base = OTHER; note = 2'-O-methyluridine-3'-phosphate
  misc_feature 1..23: note = RNA
  misc_feature 24..25: note = DNA
tattataaaaatatcttgctttttt

SEQ ID NO: 2888 - DNA, 25 bp, synthetic construct
  source 1..25: mol_type = other DNA
  modified_base 1: mod_base = OTHER; note = 2'-O-methyluridine-3'-phosphorothioate
  modified_base 2: mod_base = OTHER; note = 2'-deoxy-2'-fluoroadenosine-3'-phosphorothioate
  modified_base 3: mod_base = OTHER; note = 2'-deoxy-2'-fluorouridine-3'-phosphate
  modified_base 4: mod_base = OTHER; note = 2'-O-methyluridine-3'-phosphate
  modified_base 5: mod_base = OTHER; note = 2'-deoxy-2'-fluoroadenosine-3'-phosphate
  modified_base 6: mod_base = OTHER; note = 2'-O-methyluridine-3'-phosphate
  modified_base 7: mod_base = OTHER; note = 2'-deoxy-2'-fluoroadenosine-3'-phosphate
  modified_base 8: mod_base = OTHER; note = 2'-deoxy-2'-fluoroadenosine-3'-phosphate
  modified_base 9: mod_base = OTHER; note = 2'-O-methyladenosine-3'-phosphate
  modified_base 10: mod_base = OTHER; note = 2'-deoxy-2'-fluoroadenosine-3'-phosphate
  modified_base 11: mod_base = OTHER; note = 2'-O-methyladenosine-3'-phosphate
  modified_base 12: mod_base = OTHER; note = 2'-O-methyluridine-3'-phosphate
  modified_base 13: mod_base = OTHER; note = 2'-O-methyladenosine-3'-phosphate
  modified_base 14: mod_base = OTHER; note = 2'-deoxy-2'-fluorouridine-3'-phosphate
  modified_base 15: mod_base = OTHER; note = 2'-O-methylcytidine-3'-phosphate
  modified_base 16: mod_base = OTHER; note = 2'-deoxy-2'-fluorouridine-3'-phosphate
  modified_base 17: mod_base = OTHER; note = 2'-O-methyluridine-3'-phosphate
  modified_base 18: mod_base = OTHER; note = 2'-deoxy-2'-fluoroguanosine-3'-phosphate
  modified_base 19: mod_base = OTHER; note = 2'-O-methylcytidine-3'-phosphate
  modified_base 20: mod_base = OTHER; note = 2'-O-methyluridine-3'-phosphate
  modified_base 21: mod_base = OTHER; note = 2'-O-methyluridine-3'-phosphorothioate
  modified_base 22: mod_base = OTHER; note = 2'-O-methyluridine-3'-phosphorothioate
  modified_base 23: mod_base = OTHER; note = 2'-O-methyluridine-3'-phosphate
  misc_feature 1..23: note = RNA
  misc_feature 24..25: note = DNA
tattataaaaatatcttgctttttt

SEQ ID NO: 2889 - DNA, 25 bp, synthetic construct
  source 1..25: mol_type = other DNA
  modified_base 1: mod_base = OTHER; note = 2'-O-methyluridine-3'-phosphorothioate
  modified_base 2: mod_base = OTHER; note = 2'-deoxy-2'-fluoroadenosine-3'-phosphorothioate
  modified_base 3: mod_base = OTHER; note = 2'-deoxy-2'-fluorouridine-3'-phosphate
  modified_base 4: mod_base = OTHER; note = 2'-O-methyluridine-3'-phosphate
  modified_base 5: mod_base = OTHER; note = 2'-deoxy-2'-fluoroadenosine-3'-phosphate
  modified_base 6: mod_base = OTHER; note = 2'-O-methyluridine-3'-phosphate
  modified_base 7: mod_base = OTHER; note = 2'-O-methyladenosine-3'-phosphate
  modified_base 8: mod_base = OTHER; note = 2'-deoxy-2'-fluoroadenosine-3'-phosphate
  modified_base 9: mod_base = OTHER; note = 2'-O-methyladenosine-3'-phosphate
  modified_base 10: mod_base = OTHER; note = 2'-deoxy-2'-fluoroadenosine-3'-phosphate
  modified_base 11: mod_base = OTHER; note = 2'-O-methyladenosine-3'-phosphate
  modified_base 12: mod_base = OTHER; note = 2'-O-methyluridine-3'-phosphate
  modified_base 13: mod_base = OTHER; note = 2'-O-methyladenosine-3'-phosphate
  modified_base 14: mod_base = OTHER; note = 2'-deoxy-2'-fluorouridine-3'-phosphate
  modified_base 15: mod_base = OTHER; note = 2'-O-methylcytidine-3'-phosphate
  modified_base 16: mod_base = OTHER; note = 2'-deoxy-2'-fluorouridine-3'-phosphate
  modified_base 17: mod_base = OTHER; note = 2'-O-methyluridine-3'-phosphate
  modified_base 18: mod_base = OTHER; note = 2'-deoxy-2'-fluoroguanosine-3'-phosphate
  modified_base 19: mod_base = OTHER; note = 2'-O-methylcytidine-3'-phosphate
  modified_base 20: mod_base = OTHER; note = 2'-O-methyluridine-3'-phosphate
  modified_base 21: mod_base = OTHER; note = 2'-O-methyluridine-3'-phosphorothioate
  modified_base 22: mod_base = OTHER; note = 2'-O-methyluridine-3'-phosphorothioate
  modified_base 23: mod_base = OTHER; note = 2'-O-methyluridine-3'-phosphate
  misc_feature 1..23: note = RNA
  misc_feature 24..25: note = DNA
tattataaaaatatcttgctttttt

SEQ ID NO: 2890 - DNA, 25 bp, synthetic construct
  source 1..25: mol_type = other DNA
  modified_base 1: mod_base = OTHER; note = 2'-O-methyluridine-3'-phosphorothioate
  modified_base 2: mod_base = OTHER; note = 2'-deoxy-2'-fluoroadenosine-3'-phosphorothioate
  modified_base 3: mod_base = OTHER; note = 2'-O-methyluridine-3'-phosphate
  modified_base 4: mod_base = OTHER; note = 2'-O-methyluridine-3'-phosphate
  modified_base 5: mod_base = OTHER; note = 2'-O-methyladenosine-3'-phosphate
  modified_base 6: mod_base = OTHER; note = 2'-deoxy-2'-fluorouridine-3'-phosphate
  modified_base 7: mod_base = OTHER; note = 2'-O-methyladenosine-3'-phosphate
  modified_base 8: mod_base = OTHER; note = 2'-deoxy-2'-fluoroadenosine-3'-phosphate
  modified_base 9: mod_base = OTHER; note = 2'-O-methyladenosine-3'-phosphate
  modified_base 10: mod_base = OTHER; note = 2'-deoxy-2'-fluoroadenosine-3'-phosphate
  modified_base 11: mod_base = OTHER; note = 2'-O-methyladenosine-3'-phosphate
  modified_base 12: mod_base = OTHER; note = 2'-O-methyluridine-3'-phosphate
  modified_base 13: mod_base = OTHER; note = 2'-O-methyladenosine-3'-phosphate
  modified_base 14: mod_base = OTHER; note = 2'-deoxy-2'-fluorouridine-3'-phosphate
  modified_base 15: mod_base = OTHER; note = 2'-O-methylcytidine-3'-phosphate
  modified_base 16: mod_base = OTHER; note = 2'-deoxy-2'-fluorouridine-3'-phosphate
  modified_base 17: mod_base = OTHER; note = 2'-O-methyluridine-3'-phosphate
  modified_base 18: mod_base = OTHER; note = 2'-deoxy-2'-fluoroguanosine-3'-phosphate
  modified_base 19: mod_base = OTHER; note = 2'-O-methylcytidine-3'-phosphate
  modified_base 20: mod_base = OTHER; note = 2'-O-methyluridine-3'-phosphate
  modified_base 21: mod_base = OTHER; note = 2'-O-methyluridine-3'-phosphorothioate
  modified_base 22: mod_base = OTHER; note = 2'-O-methyluridine-3'-phosphorothioate
  modified_base 23: mod_base = OTHER; note = 2'-O-methyluridine-3'-phosphate
  misc_feature 1..23: note = RNA
  misc_feature 24..25: note = DNA
tattataaaaatatcttgctttttt

SEQ ID NO: 2891 - DNA, 25 bp, synthetic construct
  source 1..25: mol_type = other DNA
  modified_base 1: mod_base = OTHER; note = 2'-O-methyluridine-3'-phosphorothioate
  modified_base 2: mod_base = OTHER; note = 2'-deoxy-2'-fluoroadenosine-3'-phosphorothioate
  modified_base 3: mod_base = OTHER; note = 2'-deoxy-2'-fluorouridine-3'-phosphate
  modified_base 4: mod_base = OTHER; note = 2'-O-methyluridine-3'-phosphate
  modified_base 5: mod_base = OTHER; note = 2'-deoxy-2'-fluoroadenosine-3'-phosphate
  modified_base 6: mod_base = OTHER; note = 2'-O-methyluridine-3'-phosphate
  modified_base 7: mod_base = OTHER; note = 2'-deoxy-2'-fluoroadenosine-3'-phosphate
  modified_base 8: mod_base = OTHER; note = 2'-deoxy-2'-fluoroadenosine-3'-phosphate
  modified_base 9: mod_base = OTHER; note = 2'-O-methyladenosine-3'-phosphate
  modified_base 10: mod_base = OTHER; note = 2'-deoxy-2'-fluoroadenosine-3'-phosphate
  modified_base 11: mod_base = OTHER; note = 2'-O-methyladenosine-3'-phosphate
  modified_base 12: mod_base = OTHER; note = 2'-O-methyluridine-3'-phosphate
  modified_base 13: mod_base = OTHER; note = 2'-O-methyladenosine-3'-phosphate
  modified_base 14: mod_base = OTHER; note = 2'-deoxy-2'-fluorouridine-3'-phosphate
  modified_base 15: mod_base = OTHER; note = 2'-O-methylcytidine-3'-phosphate
  modified_base 16: mod_base = OTHER; note = 2'-deoxy-2'-fluorouridine-3'-phosphate
  modified_base 17: mod_base = OTHER; note = 2'-O-methyluridine-3'-phosphate
  modified_base 18: mod_base = OTHER; note = 2'-deoxy-2'-fluoroguanosine-3'-phosphate
  modified_base 19: mod_base = OTHER; note = 2'-O-methylcytidine-3'-phosphate
  modified_base 20: mod_base = OTHER; note = 2'-O-methyluridine-3'-phosphate
  modified_base 21: mod_base = OTHER; note = 2'-O-methyluridine-3'-phosphorothioate
  modified_base 22: mod_base = OTHER; note = 2'-O-methyluridine-3'-phosphorothioate
  modified_base 23: mod_base = OTHER; note = 2'-O-methyluridine-3'-phosphate
  misc_feature 1..23: note = RNA
  misc_feature 24..25: note = DNA
tattataaaaatatcttgctttttt

SEQ ID NO: 2892 - DNA, 25 bp, synthetic construct
  source 1..25: mol_type = other DNA
  modified_base 1: mod_base = OTHER; note = 2'-O-methyluridine-3'-phosphorothioate
  modified_base 2: mod_base = OTHER; note = 2'-deoxy-2'-fluoroadenosine-3'-phosphorothioate
  modified_base 3: mod_base = OTHER; note = 2'-deoxy-2'-fluorouridine-3'-phosphate
  modified_base 4: mod_base = OTHER; note = 2'-O-methyluridine-3'-phosphate
  modified_base 5: mod_base = OTHER; note = 2'-deoxy-2'-fluoroadenosine-3'-phosphate
  modified_base 6: mod_base = OTHER; note = 2'-O-methyluridine-3'-phosphate
  modified_base 7: mod_base = OTHER; note = 2'-O-methyladenosine-3'-phosphate
  modified_base 8: mod_base = OTHER; note = 2'-deoxy-2'-fluoroadenosine-3'-phosphate
  modified_base 9: mod_base = OTHER; note = 2'-O-methyladenosine-3'-phosphate
  modified_base 10: mod_base = OTHER; note = 2'-deoxy-2'-fluoroadenosine-3'-phosphate
  modified_base 11: mod_base = OTHER; note = 2'-O-methyladenosine-3'-phosphate
  modified_base 12: mod_base = OTHER; note = 2'-O-methyluridine-3'-phosphate
  modified_base 13: mod_base = OTHER; note = 2'-O-methyladenosine-3'-phosphate
  modified_base 14: mod_base = OTHER; note = 2'-deoxy-2'-fluorouridine-3'-phosphate
  modified_base 15: mod_base = OTHER; note = 2'-O-methylcytidine-3'-phosphate
  modified_base 16: mod_base = OTHER; note = 2'-deoxy-2'-fluorouridine-3'-phosphate
  modified_base 17: mod_base = OTHER; note = 2'-O-methyluridine-3'-phosphate
  modified_base 18: mod_base = OTHER; note = 2'-deoxy-2'-fluoroguanosine-3'-phosphate
  modified_base 19: mod_base = OTHER; note = 2'-O-methylcytidine-3'-phosphate
  modified_base 20: mod_base = OTHER; note = 2'-O-methyluridine-3'-phosphate
  modified_base 21: mod_base = OTHER; note = 2'-O-methyluridine-3'-phosphorothioate
  modified_base 22: mod_base = OTHER; note = 2'-O-methyluridine-3'-phosphorothioate
  modified_base 23: mod_base = OTHER; note = 2'-O-methyluridine-3'-phosphate
  misc_feature 1..23: note = RNA
  misc_feature 24..25: note = DNA
tattataaaaatatcttgctttttt

SEQ ID NO: 2893 - DNA, 25 bp, synthetic construct
  source 1..25: mol_type = other DNA
  modified_base 1: mod_base = OTHER; note = 2'-O-methyluridine-3'-phosphorothioate
  modified_base 2: mod_base = OTHER; note = 2'-deoxy-2'-fluoroadenosine-3'-phosphorothioate
  modified_base 3: mod_base = OTHER; note = 2'-O-methyluridine-3'-phosphate
  modified_base 4: mod_base = OTHER; note = 2'-O-methyluridine-3'-phosphate
  modified_base 5: mod_base = OTHER; note = 2'-O-methyladenosine-3'-phosphate
  modified_base 6: mod_base = OTHER; note = 2'-deoxy-2'-fluorouridine-3'-phosphate
  modified_base 7: mod_base = OTHER; note = 2'-O-methyladenosine-3'-phosphate
  modified_base 8: mod_base = OTHER; note = 2'-deoxy-2'-fluoroadenosine-3'-phosphate
  modified_base 9: mod_base = OTHER; note = 2'-O-methyladenosine-3'-phosphate
  modified_base 10: mod_base = OTHER; note = 2'-deoxy-2'-fluoroadenosine-3'-phosphate
  modified_base 11: mod_base = OTHER; note = 2'-O-methyladenosine-3'-phosphate
  modified_base 12: mod_base = OTHER; note = 2'-O-methyluridine-3'-phosphate
  modified_base 13: mod_base = OTHER; note = 2'-O-methyladenosine-3'-phosphate
  modified_base 14: mod_base = OTHER; note = 2'-deoxy-2'-fluorouridine-3'-phosphate
  modified_base 15: mod_base = OTHER; note = 2'-O-methylcytidine-3'-phosphate
  modified_base 16: mod_base = OTHER; note = 2'-deoxy-2'-fluorouridine-3'-phosphate
  modified_base 17: mod_base = OTHER; note = 2'-O-methyluridine-3'-phosphate
  modified_base 18: mod_base = OTHER; note = 2'-deoxy-2'-fluoroguanosine-3'-phosphate
  modified_base 19: mod_base = OTHER; note = 2'-O-methylcytidine-3'-phosphate
  modified_base 20: mod_base = OTHER; note = 2'-O-methyluridine-3'-phosphate
  modified_base 21: mod_base = OTHER; note = 2'-O-methyluridine-3'-phosphorothioate
  modified_base 22: mod_base = OTHER; note = 2'-O-methyluridine-3'-phosphorothioate
  modified_base 23: mod_base = OTHER; note = 2'-O-methyluridine-3'-phosphate
  misc_feature 1..23: note = RNA
  misc_feature 24..25: note = DNA
tattataaaaatatcttgctttttt

SEQ ID NO: 2894 - DNA, 25 bp, synthetic construct
  source 1..25: mol_type = other DNA
  modified_base 1: mod_base = OTHER; note = 2'-O-methyluridine-3'-phosphorothioate
  modified_base 2: mod_base = OTHER; note = 2'-deoxy-2'-fluoroadenosine-3'-phosphorothioate
  modified_base 3: mod_base = OTHER; note = 2'-deoxy-2'-fluorouridine-3'-phosphate
  modified_base 4: mod_base = OTHER; note = 2'-O-methyluridine-3'-phosphate
  modified_base 5: mod_base = OTHER; note = 2'-deoxy-2'-fluoroadenosine-3'-phosphate
  modified_base 6: mod_base = OTHER; note = 2'-O-methyluridine-3'-phosphate
  modified_base 7: mod_base = OTHER; note = 2'-deoxy-2'-fluoroadenosine-3'-phosphate
  modified_base 8: mod_base = OTHER; note = 2'-deoxy-2'-fluoroadenosine-3'-phosphate
  modified_base 9: mod_base = OTHER; note = 2'-O-methyladenosine-3'-phosphate
  modified_base 10: mod_base = OTHER; note = 2'-deoxy-2'-fluoroadenosine-3'-phosphate
  modified_base 11: mod_base = OTHER; note = 2'-O-methyladenosine-3'-phosphate
  modified_base 12: mod_base = OTHER; note = 2'-O-methyluridine-3'-phosphate
  modified_base 13: mod_base = OTHER; note = 2'-O-methyladenosine-3'-phosphate
  modified_base 14: mod_base = OTHER; note = 2'-deoxy-2'-fluorouridine-3'-phosphate
  modified_base 15: mod_base = OTHER; note = 2'-O-methylcytidine-3'-phosphate
  modified_base 16: mod_base = OTHER; note = 2'-deoxy-2'-fluorouridine-3'-phosphate
  modified_base 17: mod_base = OTHER; note = 2'-O-methyluridine-3'-phosphate
  modified_base 18: mod_base = OTHER; note = 2'-deoxy-2'-fluoroguanosine-3'-phosphate
  modified_base 19: mod_base = OTHER; note = 2'-O-methylcytidine-3'-phosphate
  modified_base 20: mod_base = OTHER; note = 2'-O-methyluridine-3'-phosphate
  modified_base 21: mod_base = OTHER; note = 2'-O-methyluridine-3'-phosphorothioate
  modified_base 22: mod_base = OTHER; note = 2'-O-methyluridine-3'-phosphorothioate
  modified_base 23: mod_base = OTHER; note = 2'-O-methyluridine-3'-phosphate
  misc_feature 1..23: note = RNA
  misc_feature 24..25: note = DNA
tattataaaaatatcttgctttttt

SEQ ID NO: 2895 - DNA, 25 bp, synthetic construct
  source 1..25: mol_type = other DNA
  modified_base 1: mod_base = OTHER; note = 2'-O-methyluridine-3'-phosphorothioate
  modified_base 2: mod_base = OTHER; note = 2'-deoxy-2'-fluoroadenosine-3'-phosphorothioate
  modified_base 3: mod_base = OTHER; note = 2'-deoxy-2'-fluorouridine-3'-phosphate
  modified_base 4: mod_base = OTHER; note = 2'-O-methyluridine-3'-phosphate
  modified_base 5: mod_base = OTHER; note = 2'-deoxy-2'-fluoroadenosine-3'-phosphate
  modified_base 6: mod_base = OTHER; note = 2'-O-methyluridine-3'-phosphate
  modified_base 7: mod_base = OTHER; note = 2'-O-methyladenosine-3'-phosphate
  modified_base 8: mod_base = OTHER; note = 2'-deoxy-2'-fluoroadenosine-3'-phosphate
  modified_base 9: mod_base = OTHER; note = 2'-O-methyladenosine-3'-phosphate
  modified_base 10: mod_base = OTHER; note = 2'-deoxy-2'-fluoroadenosine-3'-phosphate
  modified_base 11: mod_base = OTHER; note = 2'-O-methyladenosine-3'-phosphate
  modified_base 12: mod_base = OTHER; note = 2'-O-methyluridine-3'-phosphate
  modified_base 13: mod_base = OTHER; note = 2'-O-methyladenosine-3'-phosphate
  modified_base 14: mod_base = OTHER; note = 2'-deoxy-2'-fluorouridine-3'-phosphate
  modified_base 15: mod_base = OTHER; note = 2'-O-methylcytidine-3'-phosphate
  modified_base 16: mod_base = OTHER; note = 2'-deoxy-2'-fluorouridine-3'-phosphate
  modified_base 17: mod_base = OTHER; note = 2'-O-methyluridine-3'-phosphate
  modified_base 18: mod_base = OTHER; note = 2'-deoxy-2'-fluoroguanosine-3'-phosphate
  modified_base 19: mod_base = OTHER; note = 2'-O-methylcytidine-3'-phosphate
  modified_base 20: mod_base = OTHER; note = 2'-O-methyluridine-3'-phosphate
  modified_base 21: mod_base = OTHER; note = 2'-O-methyluridine-3'-phosphorothioate
  modified_base 22: mod_base = OTHER; note = 2'-O-methyluridine-3'-phosphorothioate
  modified_base 23: mod_base = OTHER; note = 2'-O-methyluridine-3'-phosphate
  misc_feature 1..23: note = RNA
  misc_feature 24..25: note = DNA
tattataaaaatatcttgctttttt

SEQ ID NO: 2896 - DNA, 25 bp, synthetic construct
  source 1..25: mol_type = other DNA
  modified_base 1: mod_base = OTHER; note = 2'-O-methyluridine-3'-phosphorothioate
  modified_base 2: mod_base = OTHER; note = 2'-deoxy-2'-fluoroadenosine-3'-phosphorothioate
  modified_base 3: mod_base = OTHER; note = 2'-O-methyluridine-3'-phosphate
  modified_base 4: mod_base = OTHER; note = 2'-O-methyluridine-3'-phosphate
  modified_base 5: mod_base = OTHER; note = 2'-O-methyladenosine-3'-phosphate
  modified_base 6: mod_base = OTHER; note = 2'-deoxy-2'-fluorouridine-3'-phosphate
  modified_base 7: mod_base = OTHER; note = 2'-O-methyladenosine-3'-phosphate
  modified_base 8: mod_base = OTHER; note = 2'-deoxy-2'-fluoroadenosine-3'-phosphate
  modified_base 9: mod_base = OTHER; note = 2'-O-methyladenosine-3'-phosphate
  modified_base 10: mod_base = OTHER; note = 2'-deoxy-2'-fluoroadenosine-3'-phosphate
  modified_base 11: mod_base = OTHER; note = 2'-O-methyladenosine-3'-phosphate
  modified_base 12: mod_base = OTHER; note = 2'-O-methyluridine-3'-phosphate
  modified_base 13: mod_base = OTHER; note = 2'-O-methyladenosine-3'-phosphate
  modified_base 14: mod_base = OTHER; note = 2'-deoxy-2'-fluorouridine-3'-phosphate
  modified_base 15: mod_base = OTHER; note = 2'-O-methylcytidine-3'-phosphate
  modified_base 16: mod_base = OTHER; note = 2'-deoxy-2'-fluorouridine-3'-phosphate
  modified_base 17: mod_base = OTHER; note = 2'-O-methyluridine-3'-phosphate
  modified_base 18: mod_base = OTHER; note = 2'-deoxy-2'-fluoroguanosine-3'-phosphate
  modified_base 19: mod_base = OTHER; note = 2'-O-methylcytidine-3'-phosphate
  modified_base 20: mod_base = OTHER; note = 2'-O-methyluridine-3'-phosphate
  modified_base 21: mod_base = OTHER; note = 2'-O-methyluridine-3'-phosphorothioate
  modified_base 22: mod_base = OTHER; note = 2'-O-methyluridine-3'-phosphorothioate
  modified_base 23: mod_base = OTHER; note = 2'-O-methyluridine-3'-phosphate
  misc_feature 1..23: note = RNA
  misc_feature 24..25: note = DNA
tattataaaaatatcttgctttttt

SEQ ID NO: 2897 - DNA, 25 bp, synthetic construct
  source 1..25: mol_type = other DNA
  modified_base 1: mod_base = OTHER; note = 2'-O-methyluridine-3'-phosphorothioate
  modified_base 2: mod_base = OTHER; note = 2'-deoxy-2'-fluoroadenosine-3'-phosphorothioate
  modified_base 3: mod_base = OTHER; note = 2'-deoxy-2'-fluorouridine-3'-phosphate
  modified_base 4: mod_base = OTHER; note = 2'-O-methyluridine-3'-phosphate
  modified_base 5: mod_base = OTHER; note = 2'-deoxy-2'-fluoroadenosine-3'-phosphate
  modified_base 6: mod_base = OTHER; note = 2'-O-methyluridine-3'-phosphate
  modified_base 7: mod_base = OTHER; note = 2'-deoxy-2'-fluoroadenosine-3'-phosphate
  modified_base 8: mod_base = OTHER; note = 2'-deoxy-2'-fluoroadenosine-3'-phosphate
  modified_base 9: mod_base = OTHER; note = 2'-O-methyladenosine-3'-phosphate
  modified_base 10: mod_base = OTHER; note = 2'-deoxy-2'-fluoroadenosine-3'-phosphate
  modified_base 11: mod_base = OTHER; note = 2'-O-methyladenosine-3'-phosphate
  modified_base 12: mod_base = OTHER; note = 2'-O-methyluridine-3'-phosphate
  modified_base 13: mod_base = OTHER; note = 2'-O-methyladenosine-3'-phosphate
  modified_base 14: mod_base = OTHER; note = 2'-deoxy-2'-fluorouridine-3'-phosphate
  modified_base 15: mod_base = OTHER; note = 2'-O-methylcytidine-3'-phosphate
  modified_base 16: mod_base = OTHER; note = 2'-deoxy-2'-fluorouridine-3'-phosphate
  modified_base 17: mod_base = OTHER; note = 2'-O-methyluridine-3'-phosphate
  modified_base 18: mod_base = OTHER; note = 2'-deoxy-2'-fluoroguanosine-3'-phosphate
  modified_base 19: mod_base = OTHER; note = 2'-O-methylcytidine-3'-phosphate
  modified_base 20: mod_base = OTHER; note = 2'-O-methyluridine-3'-phosphate
  modified_base 21: mod_base = OTHER; note = 2'-O-methyluridine-3'-phosphorothioate
  modified_base 22: mod_base = OTHER; note = 2'-O-methyluridine-3'-phosphorothioate
  modified_base 23: mod_base = OTHER; note = 2'-O-methyluridine-3'-phosphate
  misc_feature 1..23: note = RNA
  misc_feature 24..25: note = DNA
tattataaaaatatcttgctttttt

SEQ ID NO: 2898 - DNA, 25 bp, synthetic construct
  source 1..25: mol_type = other DNA
  modified_base 1: mod_base = OTHER; note = 2'-O-methyluridine-3'-phosphorothioate
  modified_base 2: mod_base = OTHER; note = 2'-deoxy-2'-fluoroadenosine-3'-phosphorothioate
  modified_base 3: mod_base = OTHER; note = 2'-deoxy-2'-fluorouridine-3'-phosphate
  modified_base 4: mod_base = OTHER; note = 2'-O-methyluridine-3'-phosphate
  modified_base 5: mod_base = OTHER; note = 2'-deoxy-2'-fluoroadenosine-3'-phosphate
  modified_base 6: mod_base = OTHER; note = 2'-O-methyluridine-3'-phosphate
  modified_base 7: mod_base = OTHER; note = 2'-O-methyladenosine-3'-phosphate
  modified_base 8: mod_base = OTHER; note = 2'-deoxy-2'-fluoroadenosine-3'-phosphate
  modified_base 9: mod_base = OTHER; note = 2'-O-methyladenosine-3'-phosphate
  modified_base 10: mod_base = OTHER; note = 2'-deoxy-2'-fluoroadenosine-3'-phosphate
  modified_base 11: mod_base = OTHER; note = 2'-O-methyladenosine-3'-phosphate
  modified_base 12: mod_base = OTHER; note = 2'-O-methyluridine-3'-phosphate
  modified_base 13: mod_base = OTHER; note = 2'-O-methyladenosine-3'-phosphate
  modified_base 14: mod_base = OTHER; note = 2'-deoxy-2'-fluorouridine-3'-phosphate
  modified_base 15: mod_base = OTHER; note = 2'-O-methylcytidine-3'-phosphate
  modified_base 16: mod_base = OTHER; note = 2'-deoxy-2'-fluorouridine-3'-phosphate
  modified_base 17: mod_base = OTHER; note = 2'-O-methyluridine-3'-phosphate
  modified_base 18: mod_base = OTHER; note = 2'-deoxy-2'-fluoroguanosine-3'-phosphate
  modified_base 19: mod_base = OTHER; note = 2'-O-methylcytidine-3'-phosphate
  modified_base 20: mod_base = OTHER; note = 2'-O-methyluridine-3'-phosphate
  modified_base 21: mod_base = OTHER; note = 2'-O-methyluridine-3'-phosphorothioate
  modified_base 22: mod_base = OTHER; note = 2'-O-methyluridine-3'-phosphorothioate
  modified_base 23: mod_base = OTHER; note = 2'-O-methyluridine-3'-phosphate
  misc_feature 1..23: note = RNA
  misc_feature 24..25: note = DNA
tattataaaaatatcttgctttttt

1. A method for treating a subject having paroxysmal nocturnal hemoglobinuria (PNH), the method selected from the group consisting of:
a) a method, comprising administering to an eculizumab naïve subject a 200-400 mg fixed dose of a double stranded ribonucleic acid (dsRNA) agent for inhibiting expression of complement component C5 once every week; and
administering to the subject a dose of about 300 mg to about 900 mg of eculizumab, or an antigen-binding fragment thereof,
wherein the dsRNA agent comprises a sense strand and an antisense strand, and
wherein the sense strand comprises 5′-asasGfcAfaGfaUfAfUfuUfuuAfuAfaua-3′ (SEQ ID NO:2876) and the antisense strand comprises 5′-usAfsUfuAfuaAfaAfauaUfcUfuGfcuususudTdT-3′ (SEQ ID NO:2889),
wherein a, g, c and u are 2′-O-methyladenosine-3′-phosphate, 2′-O-methylcytidine-3′-phosphate, 2′-O-methylguanosine-3′-phosphate, and 2′-O-methyluridine-3′-phosphate, respectively; Af, Gf, Cf and Uf are 2′-fluoroadenosine-3′-phosphate, 2′-fluorocytidine-3′-phosphate, 2′-fluoroguanosine-3′-phosphate, and 2′-fluorouridine-3′-phosphate, respectively; dT is a deoxy-thymine nucleotide; and s is a phosphorothioate linkage, thereby treating the subject;
b) a method, comprising administering to an eculizumab naïve subject a 200-400 mg fixed dose of a double stranded ribonucleic acid (dsRNA) agent for inhibiting expression of complement component C5 once every month; and
administering to the subject a dose of about 300 mg to about 900 mg of eculizumab, or an antigen-binding fragment thereof,
wherein the dsRNA agent comprises a sense strand and an antisense strand, and
wherein the sense strand comprises 5′-asasGfcAfaGfaUfAfUfuUfuuAfuAfaua-3′ (SEQ ID NO:2876) and the antisense strand comprises 5′-usAfsUfuAfuaAfaAfauaUfcUfuGfcuususudTdT-3′ (SEQ ID NO:2889),
wherein a, g, c and u are 2′-O-methyladenosine-3′-phosphate, 2′-O-methylcytidine-3′-phosphate, 2′-O-methylguanosine-3′-phosphate, and 2′-O-methyluridine-3′-phosphate, respectively; Af, Gf, Cf and Uf are 2′-fluoroadenosine-3′-phosphate, 2′-fluorocytidine-3′-phosphate, 2′-fluoroguanosine-3′-phosphate, and 2′-fluorouridine-3′-phosphate, respectively; dT is a deoxy-thymine nucleotide; and s is a phosphorothioate linkage, thereby treating the subject;
c) a method, comprising administering to an eculizumab naïve subject a 200 mg fixed dose of a double stranded ribonucleic acid (dsRNA) agent for inhibiting expression of complement component C5 once every week for 10-15 weeks, followed by a 400 mg fixed dose of the dsRNA agent once every week; and
administering to the subject, a dose of about 300 mg to about 900 mg of eculizumab, or an antigen-binding fragment thereof,
wherein the dsRNA agent comprises a sense strand and an antisense strand, and
wherein the sense strand comprises 5′-asasGfcAfaGfaUfAfUfuUfuuAfuAfaua-3′ (SEQ ID NO:2876) and the antisense strand comprises 5′-usAfsUfuAfuaAfaAfauaUfcUfuGfcuususudTdT-3′ (SEQ ID NO:2889),
wherein a, g, c and u are 2′-O-methyladenosine-3′-phosphate, 2′-O-methylcytidine-3′-phosphate, 2′-O-methylguanosine-3′-phosphate, and 2′-O-methyluridine-3′-phosphate, respectively; Af, Gf, Cf and Uf are 2′-fluoroadenosine-3′-phosphate, 2′-fluorocytidine-3′-phosphate, 2′-fluoroguanosine-3′-phosphate, and 2′-fluorouridine-3′-phosphate, respectively; dT is a deoxy-thymine nucleotide; and s is a phosphorothioate linkage, thereby treating the subject;
d) a method, comprising administering to an eculizumab naïve subject a 200 mg fixed dose of a double stranded ribonucleic acid (dsRNA) agent for inhibiting expression of complement component C5 once every month for 2 to 4 months; and
administering to the subject, a dose of about 300 mg to about 900 mg of eculizumab, or an antigen-binding fragment thereof,
wherein the dsRNA agent comprises a sense strand and an antisense strand, and
wherein the sense strand comprises 5′-asasGfcAfaGfaUfAfUfuUfuuAfuAfaua-3′ (SEQ ID NO:2876) and the antisense strand comprises 5′-usAfsUfuAfuaAfaAfauaUfcUfuGfcuususudTdT-3′ (SEQ ID NO:2889),
wherein a, g, c and u are 2′-O-methyladenosine-3′-phosphate, 2′-O-methylcytidine-3′-phosphate, 2′-O-methylguanosine-3′-phosphate, and 2′-O-methyluridine-3′-phosphate, respectively; Af, Gf, Cf and Uf are 2′-fluoroadenosine-3′-phosphate, 2′-fluorocytidine-3′-phosphate, 2′-fluoroguanosine-3′-phosphate, and 2′-fluorouridine-3′-phosphate, respectively; dT is a deoxy-thymine nucleotide; and s is a phosphorothioate linkage, thereby treating the subject;
e) a method, comprising administering to an eculizumab naïve subject a 400 mg fixed dose of a double stranded ribonucleic acid (dsRNA) agent for inhibiting expression of complement component C5 once every week; and
administering to the subject, a dose of about 300 mg to about 900 mg of eculizumab, or an antigen-binding fragment thereof,
wherein the dsRNA agent comprises a sense strand and an antisense strand, and
wherein the sense strand comprises 5′-asasGfcAfaGfaUfAfUfuUfuuAfuAfaua-3′ (SEQ ID NO:2876) and the antisense strand comprises 5′-usAfsUfuAfuaAfaAfauaUfcUfuGfcuususudTdT-3′ (SEQ ID NO:2889),
wherein a, g, c and u are 2′-O-methyladenosine-3′-phosphate, 2′-O-methylcytidine-3′-phosphate, 2′-O-methylguanosine-3′-phosphate, and 2′-O-methyluridine-3′-phosphate, respectively; Af, Gf, Cf and Uf are 2′-fluoroadenosine-3′-phosphate, 2′-fluorocytidine-3′-phosphate, 2′-fluoroguanosine-3′-phosphate, and 2′-fluorouridine-3′-phosphate, respectively; dT is a deoxy-thymine nucleotide; and s is a phosphorothioate linkage, thereby treating the subject; and
f) a method, comprising administering to an eculizumab naïve subject a 400 mg fixed dose of a double stranded ribonucleic acid (dsRNA) agent for inhibiting expression of complement component C5 once every month; and
administering to the subject, a dose of about 300 mg to about 900 mg of eculizumab, or an antigen-binding fragment thereof,
wherein the dsRNA agent comprises a sense strand and an antisense strand, and
wherein the sense strand comprises 5′-asasGfcAfaGfaUfAfUfuUfuuAfuAfaua-3′ (SEQ ID NO:2876) and the antisense strand comprises 5′-usAfsUfuAfuaAfaAfauaUfcUfuGfcuususudTdT-3′ (SEQ ID NO:2889),
wherein a, g, c and u are 2′-O-methyladenosine-3′-phosphate, 2′-O-methylcytidine-3′-phosphate, 2′-O-methylguanosine-3′-phosphate, and 2′-O-methyluridine-3′-phosphate, respectively; Af, Gf, Cf and Uf are 2′-fluoroadenosine-3′-phosphate, 2′-fluorocytidine-3′-phosphate, 2′-fluoroguanosine-3′-phosphate, and 2′-fluorouridine-3′-phosphate, respectively; dT is a deoxy-thymine nucleotide; and s is a phosphorothioate linkage, thereby treating the subject.

2.-6. (canceled)

7. A method for treating a subject having paroxysmal nocturnal hemoglobinuria (PNH), the method selected from the group consisting of:
a) a method, comprising administering to a subject previously treated with eculizumab, a 400 mg fixed dose of a double stranded ribonucleic acid (dsRNA) agent for inhibiting expression of complement component C5 once every week; and
administering to the subject, a dose of about 300 mg to about 900 mg of eculizumab, or an antigen-binding fragment thereof,
wherein the dsRNA agent comprises a sense strand and an antisense strand, and
wherein the sense strand comprises 5′-asasGfcAfaGfaUfAfUfuUfuuAfuAfaua-3′ (SEQ ID NO:2876) and the antisense strand comprises 5′-usAfsUfuAfuaAfaAfauaUfcUfuGfcuususudTdT-3′ (SEQ ID NO:2889),
wherein a, g, c and u are 2′-O-methyladenosine-3′-phosphate, 2′-O-methylcytidine-3′-phosphate, 2′-O-methylguanosine-3′-phosphate, and 2′-O-methyluridine-3′-phosphate, respectively; Af, Gf, Cf and Uf are 2′-fluoroadenosine-3′-phosphate, 2′-fluorocytidine-3′-phosphate, 2′-fluoroguanosine-3′-phosphate, and 2′-fluorouridine-3′-phosphate, respectively; dT is a deoxy-thymine nucleotide; and s is a phosphorothioate linkage, thereby treating the subject;
b) a method, comprising administering to a subject previously treated with eculizumab, a 400 mg fixed dose of a double stranded ribonucleic acid (dsRNA) agent for inhibiting expression of complement component C5 once every month; and
administering to the subject, a dose of about 300 mg to about 900 mg of eculizumab, or an antigen-binding fragment thereof,
wherein the dsRNA agent comprises a sense strand and an antisense strand, and
wherein the sense strand comprises 5′-asasGfcAfaGfaUfAfUfuUfuuAfuAfaua-3′ (SEQ ID NO:2876) and the antisense strand comprises 5′-usAfsUfuAfuaAfaAfauaUfcUfuGfcuususudTdT-3′ (SEQ ID NO:2889),
wherein a, g, c and u are 2′-O-methyladenosine-3′-phosphate, 2′-O-methylcytidine-3′-phosphate, 2′-O-methylguanosine-3′-phosphate, and 2′-O-methyluridine-3′-phosphate, respectively; Af, Gf, Cf and Uf are 2′-fluoroadenosine-3′-phosphate, 2′-fluorocytidine-3′-phosphate, 2′-fluoroguanosine-3′-phosphate, and 2′-fluorouridine-3′-phosphate, respectively; dT is a deoxy-thymine nucleotide; and s is a phosphorothioate linkage, thereby treating the subject;
c) a method, comprising administering to a subject previously treated with eculizumab, a 400 mg fixed dose of a double stranded ribonucleic acid (dsRNA) agent for inhibiting expression of complement component C5 once every week for 2-8 weeks; and
administering to the subject, a dose of about 300 mg to about 900 mg of eculizumab, or an antigen-binding fragment thereof,
wherein the dsRNA agent comprises a sense strand and an antisense strand, and
wherein the sense strand comprises 5′-asasGfcAfaGfaUfAfUfuUfuuAfuAfaua-3′ (SEQ ID NO:2876) and the antisense strand comprises 5′-usAfsUfuAfuaAfaAfauaUfcUfuGfcuususudTdT-3′ (SEQ ID NO:2889),
wherein a, g, c and u are 2′-O-methyladenosine-3′-phosphate, 2′-O-methylcytidine-3′-phosphate, 2′-O-methylguanosine-3′-phosphate, and 2′-O-methyluridine-3′-phosphate, respectively; Af, Gf, Cf and Uf are 2′-fluoroadenosine-3′-phosphate, 2′-fluorocytidine-3′-phosphate, 2′-fluoroguanosine-3′-phosphate, and 2′-fluorouridine-3′-phosphate, respectively; dT is a deoxy-thymine nucleotide; and s is a phosphorothioate linkage, thereby treating the subject;
d) a method, comprising administering to a subject previously treated with eculizumab, a 400 mg fixed dose of a double stranded ribonucleic acid (dsRNA) agent for inhibiting expression of complement component C5 once every month for 1-2 months; and
administering to the subject, a dose of about 300 mg to about 900 mg of eculizumab, or an antigen-binding fragment thereof,
wherein the dsRNA agent comprises a sense strand and an antisense strand, and
wherein the sense strand comprises 5′-asasGfcAfaGfaUfAfUfuUfuuAfuAfaua-3′ (SEQ ID NO:2876) and the antisense strand comprises 5′-usAfsUfuAfuaAfaAfauaUfcUfuGfcuususudTdT-3′ (SEQ ID NO:2889),
wherein a, g, c and u are 2′-O-methyladenosine-3′-phosphate, 2′-O-methylcytidine-3′-phosphate, 2′-O-methylguanosine-3′-phosphate, and 2′-O-methyluridine-3′-phosphate, respectively; Af, Gf, Cf and Uf are 2′-fluoroadenosine-3′-phosphate, 2′-fluorocytidine-3′-phosphate, 2′-fluoroguanosine-3′-phosphate, and 2′-fluorouridine-3′-phosphate, respectively; dT is a deoxy-thymine nucleotide; and s is a phosphorothioate linkage, thereby treating the subject;
e) a method, comprising administering to a subject previously treated with eculizumab, a 200 mg fixed dose of a double stranded ribonucleic acid (dsRNA) agent for inhibiting expression of complement component C5 once every week; and
administering to the subject, a dose of about 300 mg to about 900 mg of eculizumab, or an antigen-binding fragment thereof,
wherein the dsRNA agent comprises a sense strand and an antisense strand, and
wherein the sense strand comprises 5′-asasGfcAfaGfaUfAfUfuUfuuAfuAfaua-3′ (SEQ ID NO:2876) and the antisense strand comprises 5′-usAfsUfuAfuaAfaAfauaUfcUfuGfcuususudTdT-3′ (SEQ ID NO:2889),
wherein a, g, c and u are 2′-O-methyladenosine-3′-phosphate, 2′-O-methylcytidine-3′-phosphate, 2′-O-methylguanosine-3′-phosphate, and 2′-O-methyluridine-3′-phosphate, respectively; Af, Gf, Cf and Uf are 2′-fluoroadenosine-3′-phosphate, 2′-fluorocytidine-3′-phosphate, 2′-fluoroguanosine-3′-phosphate, and 2′-fluorouridine-3′-phosphate, respectively; dT is a deoxy-thymine nucleotide; and s is a phosphorothioate linkage, thereby treating the subject;
f) a method, comprising administering to a subject previously treated with eculizumab, a 200 mg fixed dose of a double stranded ribonucleic acid (dsRNA) agent for inhibiting expression of complement component C5 once every month; and
administering to the subject, a dose of about 300 mg to about 900 mg of eculizumab, or an antigen-binding fragment thereof,
wherein the dsRNA agent comprises a sense strand and an antisense strand, and
wherein the sense strand comprises 5′-asasGfcAfaGfaUfAfUfuUfuuAfuAfaua-3′ (SEQ ID NO:2876) and the antisense strand comprises 5′-usAfsUfuAfuaAfaAfauaUfcUfuGfcuususudTdT-3′ (SEQ ID NO:2889),
wherein a, g, c and u are 2′-O-methyladenosine-3′-phosphate, 2′-O-methylcytidine-3′-phosphate, 2′-O-methylguanosine-3′-phosphate, and 2′-O-methyluridine-3′-phosphate, respectively; Af, Gf, Cf and Uf are 2′-fluoroadenosine-3′-phosphate, 2′-fluorocytidine-3′-phosphate, 2′-fluoroguanosine-3′-phosphate, and 2′-fluorouridine-3′-phosphate, respectively; dT is a deoxy-thymine nucleotide; and s is a phosphorothioate linkage, thereby treating the subject;
g) a method comprising administering to a subject that has not responded to treatment with eculizumab, a 200 mg fixed dose of a double stranded ribonucleic acid (dsRNA) agent for inhibiting expression of complement component C5 once every week; and
administering to the subject, a dose of about 300 mg to about 900 mg of eculizumab, or an antigen-binding fragment thereof,
wherein the dsRNA agent comprises a sense strand and an antisense strand, and
wherein the sense strand comprises 5′-asasGfcAfaGfaUfAfUfuUfuuAfuAfaua-3′ (SEQ ID NO:2876) and the antisense strand comprises 5′-usAfsUfuAfuaAfaAfauaUfcUfuGfcuususudTdT-3′ (SEQ ID NO:2889),
wherein a, g, c and u are 2′-O-methyladenosine-3′-phosphate, 2′-O-methylcytidine-3′-phosphate, 2′-O-methylguanosine-3′-phosphate, and 2′-O-methyluridine-3′-phosphate, respectively; Af, Gf, Cf and Uf are 2′-fluoroadenosine-3′-phosphate, 2′-fluorocytidine-3′-phosphate, 2′-fluoroguanosine-3′-phosphate, and 2′-fluorouridine-3′-phosphate, respectively; dT is a deoxy-thymine nucleotide; and s is a phosphorothioate linkage, thereby treating the subject;
h) a method comprising administering to a subject that has not responded to treatment with eculizumab, a 200 mg fixed dose of a double stranded ribonucleic acid (dsRNA) agent for inhibiting expression of complement component C5 once every month; and
administering to the subject, a dose of about 300 mg to about 900 mg of eculizumab, or an antigen-binding fragment thereof,
wherein the dsRNA agent comprises a sense strand and an antisense strand, and
wherein the sense strand comprises 5′-asasGfcAfaGfaUfAfUfuUfuuAfuAfaua-3′ (SEQ ID NO:2876) and the antisense strand comprises 5′-usAfsUfuAfuaAfaAfauaUfcUfuGfcuususudTdT-3′ (SEQ ID NO:2889),
wherein a, g, c and u are 2′-O-methyladenosine-3′-phosphate, 2′-O-methylcytidine-3′-phosphate, 2′-O-methylguanosine-3′-phosphate, and 2′-O-methyluridine-3′-phosphate, respectively; Af, Gf, Cf and Uf are 2′-fluoroadenosine-3′-phosphate, 2′-fluorocytidine-3′-phosphate, 2′-fluoroguanosine-3′-phosphate, and 2′-fluorouridine-3′-phosphate, respectively; dT is a deoxy-thymine nucleotide; and s is a phosphorothioate linkage, thereby treating the subject;
i) a method, comprising administering to a subject that has not responded to treatment with eculizumab, a 400 mg fixed dose of a double stranded ribonucleic acid (dsRNA) agent for inhibiting expression of complement component C5 once every week; and
administering to the subject, a dose of about 300 mg to about 900 mg of eculizumab, or an antigen-binding fragment thereof,
wherein the dsRNA agent comprises a sense strand and an antisense strand, and
wherein the sense strand comprises 5′-asasGfcAfaGfaUfAfUfuUfuuAfuAfaua-3′ (SEQ ID NO:2876) and the antisense strand comprises 5′-usAfsUfuAfuaAfaAfauaUfcUfuGfcuususudTdT-3′ (SEQ ID NO:2889),
wherein a, g, c and u are 2′-O-methyladenosine-3′-phosphate, 2′-O-methylcytidine-3′-phosphate, 2′-O-methylguanosine-3′-phosphate, and 2′-O-methyluridine-3′-phosphate, respectively; Af, Gf, Cf and Uf are 2′-fluoroadenosine-3′-phosphate, 2′-fluorocytidine-3′-phosphate, 2′-fluoroguanosine-3′-phosphate, and 2′-fluorouridine-3′-phosphate, respectively; dT is a deoxy-thymine nucleotide; and s is a phosphorothioate linkage, thereby treating the subject; and
j) a method comprising administering to a subject that has not responded to treatment with eculizumab, a 400 mg fixed dose of a double stranded ribonucleic acid (dsRNA) agent for inhibiting expression of complement component C5 once every month; and
administering to the subject, a dose of about 300 mg to about 900 mg of eculizumab, or an antigen-binding fragment thereof,
wherein the dsRNA agent comprises a sense strand and an antisense strand, and
wherein the sense strand comprises 5′-asasGfcAfaGfaUfAfUfuUfuuAfuAfaua-3′ (SEQ ID NO:2876) and the antisense strand comprises 5′-usAfsUfuAfuaAfaAfauaUfcUfuGfcuususudTdT-3′ (SEQ ID NO:2889),
wherein a, g, c and u are 2′-O-methyladenosine-3′-phosphate, 2′-O-methylcytidine-3′-phosphate, 2′-O-methylguanosine-3′-phosphate, and 2′-O-methyluridine-3′-phosphate, respectively; Af, Gf, Cf and Uf are 2′-fluoroadenosine-3′-phosphate, 2′-fluorocytidine-3′-phosphate, 2′-fluoroguanosine-3′-phosphate, and 2′-fluorouridine-3′-phosphate, respectively; dT is a deoxy-thymine nucleotide; and s is a phosphorothioate linkage, thereby treating the subject.

8.-16. (canceled)

17. The method of claim 1, wherein the dose of eculizumab, or an antigen-binding fragment thereof, is about 25% to about 75% of the eculizumab maintenance label dose.

18. The method of claim 17, wherein the dose of eculizumab, or an antigen-binding fragment thereof, is 300 mg to 600 mg_ or 600 mg to 900 mg.

19. (canceled)

20. The method of claim 1, wherein the frequency of administration of eculizumab is reduced as compared to the frequency of administration required by the label.

21. The method of claim 20, wherein eculizumab is administered to the subject once every four weeks, every 2 months, every 3 months, every 4 months, every 5 months or every 6 months.

22. The method of claim 1, wherein the eculizumab, or an antigen-binding fragment thereof, is administered to the subject as a 600 mg fixed dose once every four weeks; a 300 mg fixed dose once every four weeks; or a 900 mg fixed dose once every four weeks.

23. (canceled)

24. The method of claim 7, wherein the eculizumab, or an antigen-binding fragment thereof, is administered to the subject as a 600 mg fixed dose once every four weeks; as a 900 mg fixed dose once every four weeks, or as a 900 mg fixed dose every other week.

25.-26. (canceled)

27. The method of claim 7, wherein the eculizumab, or an antigen-binding fragment thereof, treatment to which the subject did not respond comprised administration to the subject of a 1200 mg fixed dose every other week.

28.-30. (canceled)

31. The method of claim 1, wherein the treatment prevents breakthrough hemolysis in the subject; reduces the mean maximum C5 mRNA level by at least about 98% relative to baseline; lowers the minimum residual C5 level to about 1.0 micrograms/ml or below; lowers the classical complement pathway (CCP) activity by at least about 94% relative to baseline; inhibits the mean maximum hemolysis, as measured by inhibition of sheep red blood cell hemolysis, by at least about 75% relative to baseline; or lowers the level of lactate dehydrogenase (LDH) in the subject to levels lower than about 1.5 times the upper limit of normal (ULN).

32.-41. (canceled)

42. The method of claim 1, wherein the dsRNA agent further comprises a ligand.

43. The method of claim 42, wherein the ligand is one or more GalNAc derivatives attached through a bivalent or trivalent branched linker.

44. The method of claim 42, wherein the ligand is

[chemical structure]

45. The method of claim 42, wherein the ligand is attached to the 3′ end of the sense strand.

46. The method of claim 45, wherein the RNAi agent is conjugated to the ligand as shown in the following schematic

[chemical structure]

47.-49. (canceled)

50. The method of claim 7, wherein the dsRNA agent further comprises a ligand.

51. The method of claim 50, wherein the ligand is one or more GalNAc derivatives attached through a bivalent or trivalent branched linker.

52. The method of claim 50, wherein the ligand is

[chemical structure]

53. The method of claim 50, wherein the ligand is attached to the 3′ end of the sense strand.

54. The method of claim 53, wherein the RNAi agent is conjugated to the ligand as shown in the following schematic [chemical structure]
